(19) United States
(12) Patent Application Publication
(10) Pub. No.: US 2025/0163454 A1
(43) Pub. Date: May 22, 2025

(54) IN VITRO AND IN VIVO PROTEIN TRANSLATION VIA IN SITU CIRCULARIZED RNAS

(71) Applicant: The Regents of the University of California, Oakland, CA (US)

(72) Inventors: Prashant Mali, La Jolla, CA (US); Aditya Kumar, La Jolla, CA (US); Ester Kwon, La Jolla, CA (US); Katelyn Miyasaki, La Jolla, CA (US)

(21) Appl. No.: 18/835,296

(22) PCT Filed: Feb. 8, 2023
(86) PCT No.: PCT/US2023/062216

§ 371 Date: Aug. 1, 2024

Related U.S. Application Data
(60) Provisional application No. 63/308,309, filed on Feb. 9, 2022.

(51) Int. Cl. C12N 15/85; A61K 39/00; A61K 39/385; A61P 37/04; C12N 15/88

(52) U.S. Cl. CPC C12N 15/85; A61K 39/385; A61P 37/04; C12N 15/88; A61K 2039/53; C12N 2830/48; C12N 2830/50; C12N 2840/203

(57) ABSTRACT

Provided herein are engineered linear RNA polynucleotide molecules that form circular RNA polynucleotide molecules in cells. Also provided are DNA constructs encoding the engineered linear RNA polynucleotide molecules.

### CROSS-REFERENCE TO RELATED APPLICATIONS

[0001] This application claims the benefit of U.S. Provisional Application No. 63/308,309 filed Feb. 9, 2022, which is incorporated herein by reference in its entirety.

### STATEMENT OF GOVERNMENT SUPPORT

[0002] This invention was made with Government support under Grant Nos. GM123313, CA222826, and HG009285, awarded by the National Institutes of Health; and Grant No. PR210085, awarded by the Department of Defense. The Government has certain rights in the invention.

### SEQUENCE LISTING INCORPORATION

[0003] This instant application contains a Sequence Listing, which is been submitted electronically in XML format in accordance to the WIPO Standard ST.26 and is hereby incorporated by reference in its entirety. The XML copy, created on Feb. 8, 2023 is named “00015-411WO1.xml” and is 2,909,290 bytes in size.

### TECHNICAL FIELD

[0004] The disclosure provides for ribozyme-mediated constructs and systems and methods thereof, for use in a variety of applications, including for protein production systems, inducible gene expression systems, gene therapy, and combinatorial screening.

### BACKGROUND

[0005] Messenger RNA (mRNA) therapeutics have rapidly emerged as viable candidates for the development of vaccines, genome editing, and the treatment of disease. However, the instability of mRNA is a key factor that must be addressed to further improve its clinical relevance. Towards this, mRNA stability has been modulated using a host of approaches, including engineering untranslated regions, incorporation of cap analogs and nucleoside modifications, and codon optimality. More recently, novel circularization strategies, which remove free ends necessary for exonuclease-mediated degradation thereby rendering RNAs resistant to most mechanisms of turnover, have emerged as a particularly promising methodology. However, simple and scalable approaches to achieve efficient in vitro production and purification of circular RNAs are lacking, thus limiting their broader application in research and translational settings.

### SUMMARY

[0006] Provided herein is a linearized ribozyme activated RNA construct comprising from 5′ to 3′ end: (a) a first ligation sequence; (b) an IRES sequence; (c) a polynucleotide sequence of interest encoding a recombinant polypeptide; (d) a 3′ UTR sequence; (e) a poly(A) sequence; and (f) a second ligation sequence, wherein the first ligation sequence comprises a 5′-OH end, the second ligation sequence comprises a 2′, 3′-cyclic phosphate end, wherein the first and second ligation sequences form a stem substrate for an RNA ligase.

[0007] In some embodiments, the IRES sequence is selected from the group consisting of a cricket paralysis virus IRES (SEQ ID NO: 1330), a Homo sapiens IGF2 IRES (SEQ ID NO: 1331), a hepatovirus A IRES (SEQ ID NO: 1332), a hepatitis C virus H77 isolate IRES (SEQ ID NO: 1333), a Homo sapiens FGF1 IRES (SEQ ID NO: 1334), a bovine viral diarrhea virus 1 IRES (SEQ ID NO: 1335), a human rhinovirus A89 IRES (SEQ ID NO: 1336), a pan paniscus LIMA1 (SEQ ID NO: 1337), a human adenovirus 2 IRES (SEQ ID NO: 1338), a Montana myotis leukoencephalitis virus IRES (SEQ ID NO: 1339), a Homo sapiens RANBP3 IRES (SEQ ID NO: 1340), a pestivirus giraffe 1 IRES (SEQ ID NO: 1341), a Homo sapiens TGIF1 IRES (SEQ ID NO: 1342), a human poliovirus 1 mahoney IRES (SEQ ID NO: 1343), a foot-and-mouth disease virus type O IRES (SEQ ID NO: 1344), an encephalomyocarditis virus 7A IRES (SEQ ID NO: 1345), an encephalomyocarditis virus 6A IRES (SEQ ID NO: 1346), an enterovirus 71 IRES (SEQ ID NO: 1347), and a coxsackievirus B3 IRES (SEQ ID NO: 1348), wherein the T nucleotides are U nucleotides in the RNA construct.

[0008] In some embodiments, the 3′ UTR sequence is selected from the group consisting of an mtRNR1-AES 3′ UTR (SEQ ID NO: 1354), an mtRNR1-LSP1 3′ UTR (SEQ ID NO: 1355), an AES-mtRNR1 3′ UTR (SEQ ID NO: 1356), an AES-hBg 3′ UTR (SEQ ID NO: 1357), an FCGRT-hBg 3′ UTR (SEQ ID NO: 1358), a 2hBg 3′ UTR (SEQ ID NO: 1359), and a HBA1 3′ UTR (SEQ ID NO: 1360), wherein the T nucleotides are U nucleotides in the RNA construct.

[0009] In some embodiments, the 3′ UTR sequence further comprises a WPRE sequence.

[0010] In some embodiments, the WPRE sequence comprises the nucleic acid sequence of SEQ ID NO: 1353.

[0011] In some embodiments, the poly(A) sequence positioned 3′ of the WPRE sequence.

[0012] In some embodiments, the poly(A) sequence has a length ranging from about 5 to about 1000 adenine nucleotides.

[0013] In some embodiments, the poly(A) sequence has a length ranging from about 5 to about 300 adenine nucleotides.

[0014] In some embodiments, a portion of the first ligation sequence is complementary to a portion of the second ligation sequence.

[0015] In some embodiments, the first and/or the second ligation sequence comprises a nucleic acid sequence having at least 90% sequence identity of 5′ AACCAUGCCGACUGAUGGCAG 3′ (SEQ ID NO: 1413).

[0016] In some embodiments, the first and/or the second ligation sequence comprises a nucleic acid sequence having at least 90% sequence identity of 5′ CUGCCAUCAGUCGGCGUGGACUGUAG 3′ (SEQ ID NO: 1415).

[0017] In some embodiments, the construct lacks a ribozyme.

[0018] In some embodiments, the construct comprises one or more modified nucleic acids.

[0019] In some embodiments, the construct capable of being introduced into a cell.

[0020] In some embodiments, the construct has been introduced into a cell.

[0021] Also provided is an engineered cell comprising any one of the linearized ribozyme activated RNA constructs described herein.

[0022] In some embodiments, the engineered cell further comprises a circular RNA construct formed from the linearized ribozyme activated RNA construct.

[0023] In some embodiments, the cell lacks a DNA construct encoding the linearized ribozyme activated RNA construct.

[0024] In some embodiments, the cell is a eukaryotic cell.

[0025] In some embodiments, the eukaryotic cell is a mammalian cell.

[0026] In some embodiments, the mammalian cell is a human cell.

[0027] Provided herein is a method for producing an engineered cell comprising a circular RNA. The method comprises: introducing any one of the linearized ribozyme activated RNA constructs described herein into the cell, wherein an RNA ligase in the cell ligates the first and second ligation sequences, thereby forming the circular RNA construct.

[0028] In some embodiments, the RNA ligase is an endogenous RtcB ligase.

[0029] In some embodiments, the cell is a eukaryotic cell.

[0030] In some embodiments, the eukaryotic cell is a mammalian cell.

[0031] In some embodiments, the mammalian cell is a human cell.

[0032] Provided herein is a method for producing a circular RNA construct, the method comprises contacting any one of the linearized ribozyme activated RNA constructs described herein with an RNA ligase.

[0033] In some embodiments, the contacting is in vitro. In some embodiments, the contacting is inside a cell.

[0034] Provided herein is a composition comprising any one of the linearized ribozyme activated RNA constructs described and a delivery system.

[0035] In some embodiments, the delivery system comprises any one selected from the group consisting of a lipid nanoparticle, a liposome, a charged polymer, an uncharged polymer, a nanoparticle, a surfactant, a penetrating enhancer, a gene transfer agent, a phospholipid, a micelle, a synthetic vector, a macromolecule, a dendrimer, a biopolymer, a viral particle, and any combination thereof.

[0036] In some embodiments, the composition is administered to a subject. In some embodiments, the subject is a human subject.

[0037] Also provided herein is a therapeutic composition comprising any one of the linearized ribozyme activated RNA construct described herein and a lipid nanoparticle, wherein the lipid nanoparticle comprises: (6Z,9Z,28Z,31Z)-heptatriaconta-6,9,28,31-tetraen-19-yl-4-(dimethylamino) butanoate (DLin-MC3-DMA); cholesterol; 1,2-distearoyl-sn-glycero-3-phosphocholine (DSPC); and 1,2-dimyristoyl-rac-glycero-3-methoxypolyethylene glycol-2000 (DMG-PEG-2000) at a mole ratio of 50:38.5:10:1.5, respectively, and the lipid nanoparticle has an N/P ratio of 5.4.

[0038] In some aspect, provided is a linearized ribozyme-RNA construct comprising from 5′ to 3′ end: (a) a first twister ribozyme; (b) a first ligation sequence; (c) an IRES sequence; (d) a polynucleotide sequence of interest encoding a recombinant polypeptide; (e) a 3′ UTR sequence; (f) a poly(A) sequence; (g) a second ligation sequence; and (h) a second twister ribozyme.

[0039] In some embodiments, the IRES sequence is selected from the group consisting of a cricket paralysis virus IRES (SEQ ID NO: 1330), a Homo sapiens IGF2 IRES (SEQ ID NO: 1331), a hepatovirus A IRES (SEQ ID NO: 1332), a hepatitis C virus H77 isolate IRES (SEQ ID NO: 1333), a Homo sapiens FGF1 IRES (SEQ ID NO: 1334), a bovine viral diarrhea virus 1 IRES (SEQ ID NO: 1335), a human rhinovirus A89 IRES (SEQ ID NO: 1336), a pan paniscus LIMA1 (SEQ ID NO: 1337), a human adenovirus 2 IRES (SEQ ID NO: 1338), a Montana myotis leukoencephalitis virus IRES (SEQ ID NO: 1339), a Homo sapiens RANBP3 IRES (SEQ ID NO: 1340), a pestivirus giraffe 1 IRES (SEQ ID NO: 1341), a Homo sapiens TGIF1 IRES (SEQ ID NO: 1342), a human poliovirus 1 mahoney IRES (SEQ ID NO: 1343), a foot-and-mouth disease virus type O IRES (SEQ ID NO: 1344), an encephalomyocarditis virus 7A IRES (SEQ ID NO: 1345), an encephalomyocarditis virus 6A IRES (SEQ ID NO: 1346), an enterovirus 71 IRES (SEQ ID NO: 1347), and a coxsackievirus B3 IRES (SEQ ID NO: 1348), wherein the T nucleotides are U nucleotides in the linearized ribozyme-RNA construct.

[0040] In some embodiments, the 3′ UTR sequence is selected from the group consisting of an mtRNR1-AES 3′ UTR (SEQ ID NO: 1354), an mtRNR1-LSP1 3′ UTR (SEQ ID NO: 1355), an AES-mtRNR1 3′ UTR (SEQ ID NO: 1356), an AES-hBg 3′ UTR (SEQ ID NO: 1357), an FCGRT-hBg 3′ UTR (SEQ ID NO: 1358), a 2hBg 3′ UTR (SEQ ID NO: 1359), and a HBA1 3′ UTR (SEQ ID NO: 1360), wherein the T nucleotides are U nucleotides in the linearized ribozyme-RNA construct.

[0041] In some embodiments, the 3′ UTR sequence further comprises a WPRE sequence.

[0042] In some embodiments, the WPRE sequence comprises the nucleic acid sequence of SEQ ID NO: 1353, wherein the T nucleotides are U nucleotides in the linearized ribozyme-RNA construct.

[0043] In some embodiments, the poly(A) sequence positioned 3′ of the WPRE sequence.

[0044] In some embodiments, the poly(A) sequence has a length ranging from about 5 to about 1000 adenine nucleotides. In some embodiments, the poly(A) sequence has a length ranging from about 5 to about 300 adenine nucleotides.

[0045] In some embodiments, the first and/or second ribozyme is selected from the group consisting a twister ribozyme, twister sister (TS) ribozyme, a hammerhead ribozyme, a hairpin ribozyme, a hepatitis delta virus (HDV) ribozyme, a Varkud satellite (VS) ribozyme, a glucosamine-6-phosphate (GimS) ribozyme, a pistol ribozyme, and a hatchet ribozyme. In some embodiments, the first ribozyme and the second ribozyme are the same twister ribozyme. In some embodiments, the first twister ribozyme and/or the second twister ribozyme is a P1 twister ribozyme. In some embodiments, the first ribozyme and/or the second ribozyme is a P3 twister ribozyme.

[0046] In some embodiments, the first twister ribozyme and/or the second twister ribozyme comprises a nucleic acid sequence having at least 90% sequence identity of 5′ GCCAUCAGUCGCCGGUCCCAAGCCCGGAUAAAAUGGGAGGGGGCGGGAAACCG CCU 3′ (SEQ ID NO: 1412).

[0047] In some embodiments, the first twister ribozyme and/or the second twister ribozyme comprises a nucleic acid sequence having at least 90% sequence identity of 5′ AACACUGCCAAUGCCGGUCCCAAGCCCGGAUAAAAGTGGAGGGUACAGUCCAC GC 3′ (SEQ ID NO: 1414).

[0048] In some embodiments, a portion of the first ligation sequence is complementary to a portion of the first twister ribozyme and a portion of the second ligation sequence is complementary to a portion of the second twister ribozyme. In some embodiments, the portion of the first ligation sequence that is complementary to the portion of the first twister ribozyme is also complementary to the portion of the second ligation sequence that is complementary to the portion of the second twister ribozyme.

[0049] In some embodiments, the first and/or the second ligation sequence comprises a nucleic acid sequence having at least 90% sequence identity of 5′ AACCAUGCCGACUGAUGGCAG 3′ (SEQ ID NO: 1413). In some embodiments, the first and/or the second ligation sequence comprises a nucleic acid sequence having at least 90% sequence identity of 5′ CUGCCAUCAGUCGGCGUGGACUGUAG 3′ (SEQ ID NO: 1415).

[0050] In some embodiments, the construct comprises one or more modified nucleic acids.

[0051] Provided herein is a DNA construct comprising a RNA polymerase II promoter and a nucleic acid sequence encoding a ribozyme-RNA construct, wherein the ribozyme-RNA construct comprises from 5′ to 3′ end: (a) a first twister ribozyme; (b) a first ligation sequence; (c) an IRES sequence; (d) a polynucleotide sequence of interest encoding a recombinant polypeptide; (e) a 3′ UTR sequence; (f) a poly(A) sequence; (g) a second ligation sequence; and (h) a second twister ribozyme, wherein promoter is operably linked to the nucleic acid sequence encoding the ribozyme-RNA construct.

[0052] In some embodiments, the IRES sequence is selected from the group consisting of a cricket paralysis virus IRES (SEQ ID NO: 1330), a Homo sapiens IGF2 IRES (SEQ ID NO: 1331), a hepatovirus A IRES (SEQ ID NO: 1332), a hepatitis C virus H77 isolate IRES (SEQ ID NO: 1333), a Homo sapiens FGF1 IRES (SEQ ID NO: 1334), a bovine viral diarrhea virus 1 IRES (SEQ ID NO: 1335), a human rhinovirus A89 IRES (SEQ ID NO: 1336), a pan paniscus LIMA1 (SEQ ID NO: 1337), a human adenovirus 2 IRES (SEQ ID NO: 1338), a Montana myotis leukoencephalitis virus IRES (SEQ ID NO: 1339), a Homo sapiens RANBP3 IRES (SEQ ID NO: 1340), a pestivirus giraffe 1 IRES (SEQ ID NO: 1341), a Homo sapiens TGIF1 IRES (SEQ ID NO: 1342), a human poliovirus 1 mahoney IRES (SEQ ID NO: 1343), a foot-and-mouth disease virus type O IRES (SEQ ID NO: 1344), an encephalomyocarditis virus 7A IRES (SEQ ID NO: 1345), an encephalomyocarditis virus 6A IRES (SEQ ID NO: 1346), an enterovirus 71 IRES (SEQ ID NO: 1347), and a coxsackievirus B3 IRES (SEQ ID NO: 1348).

[0053] In some embodiments, the 3′ UTR sequence is selected from the group consisting of mtRNR1-AES 3′ UTR (SEQ ID NO: 1354), mtRNR1-LSP1 3′ UTR (SEQ ID NO: 1355), AES-mtRNR1 3′ UTR (SEQ ID NO: 1356), AES-hBg 3′ UTR (SEQ ID NO: 1357), FCGRT-hBg 3′ UTR (SEQ ID NO: 1358), 2hBg 3′ UTR (SEQ ID NO: 1359), and HBA1 3′ UTR (SEQ ID NO: 1360).

[0054] In some embodiments, the 3′ UTR sequence further comprises a WPRE sequence.

[0055] In some embodiments, the WPRE sequence comprises the nucleic acid sequence of SEQ ID NO: 1353.

[0056] In some embodiments, the poly(A) sequence is positioned 3′ of the WPRE sequence. In some embodiments, the poly(A) sequence has a length ranging from about 5 to about 1000 adenine nucleotides. In some embodiments, the poly(A) sequence has a length ranging from about 5 to about 300 adenine nucleotides.

[0057] In some embodiments, the first and/or second ribozyme is selected from the group consisting a twister ribozyme, twister sister (TS) ribozyme, a hammerhead ribozyme, a hairpin ribozyme, a hepatitis delta virus (HDV) ribozyme, a Varkud satellite (VS) ribozyme, a glucosamine-6-phosphate (GimS) ribozyme, a pistol ribozyme, and a hatchet ribozyme.

[0058] The DNA construct of any one of claims 54-62, wherein the first ribozyme and the second ribozyme are the same twister ribozyme. In some embodiments, the first twister ribozyme and/or the second twister ribozyme is a P1 twister ribozyme. In some embodiments, the first ribozyme and/or the second ribozyme is a P3 twister ribozyme.

[0059] In some embodiments, the first twister ribozyme and/or the second twister ribozyme comprises a nucleic acid sequence having at least 90% sequence identity of 5′ GCCATCAGTCGCCGGTCCCAAGCCCGGATAAAATGGGAGGGGGCGGGAAACCGC CT 3′ (SEQ ID NO: 1349).

[0060] In some embodiments, the first twister ribozyme and/or the second twister ribozyme comprises a nucleic acid sequence having at least 90% sequence identity of 5′ AACACTGCCAATGCCGGTCCCAAGCCCGGATAAAAGTGGAGGGTACAGTCCACG C 3′ (SEQ ID NO: 1350).

[0061] In some embodiments, a portion of the first ligation sequence is complementary to a portion of the first twister ribozyme and a portion of the second ligation sequence is complementary to a portion of the second twister ribozyme

[0062] In some embodiments, the portion of the first ligation sequence that is complementary to the portion of the first twister ribozyme is complementary to the portion of the second ligation sequence that is complementary to the portion of the second twister ribozyme.

[0063] In some embodiments, the first and/or the second ligation sequence comprises a nucleic acid sequence having at least 90% sequence identity of 5′ AACCATGCCGACTGATGGCAG 3′ (SEQ ID NO:1351).

[0064] In some embodiments, the first and/or the second ligation sequence comprises a nucleic acid sequence having at least 90% sequence identity of 5′ CTGCCATCAGTCGGCGTGGACTGTAG 3′ (SEQ ID NO: 1352).

[0065] In some embodiments, provided herein is A cell comprising any one of the DNA construct described herein.

[0066] In some embodiments, cell is a eukaryotic cell. In some embodiments, eukaryotic cell is a mammalian cell. In some embodiments, the eukaryotic cell is a human cell.

[0067] Also provided is a cell comprising a circular RNA construct, wherein the circular RNA construct comprises: (a) a first ligation sequence; (b) an IRES sequence positioned 3′ of the first ligation sequence; (c) a polynucleotide sequence of interest encoding a recombinant polypeptide and positioned 3′ of the IRES sequence; (d) a 3′ UTR sequence positioned 3′ of the IRES sequence; (e) a poly(A) sequence positioned 3′ of the 3′ UTR; and (f) a second ligation sequence positioned 3′ of the poly (A) sequence, wherein the first and second ligation sequences are ligated together.

[0068] In some embodiments, the cell is a mammalian cell. In some embodiments, the cell is a human cell.

[0069] In some embodiments, the cell produces an elevated level of the recombinant polypeptide as compared to a corresponding wild-type cell.

[0070] In some embodiments, the first and second ligation sequences are ligated together in the cell by an endogenous RNA ligase.

[0071] In some embodiments, the IRES sequence is selected from the group consisting of a cricket paralysis virus IRES (SEQ ID NO: 1330), a Homo sapiens IGF2 IRES (SEQ ID NO: 1331), a hepatovirus A IRES (SEQ ID NO: 1332), a hepatitis C virus H77 isolate IRES (SEQ ID NO: 1333), a Homo sapiens FGF1 IRES (SEQ ID NO: 1334), a bovine viral diarrhea virus 1 IRES (SEQ ID NO: 1335), a human rhinovirus A89 IRES (SEQ ID NO: 1336), a pan paniscus LIMA1 (SEQ ID NO: 1337), a human adenovirus 2 IRES (SEQ ID NO: 1338), a Montana myotis leukoencephalitis virus IRES (SEQ ID NO: 1339), a Homo sapiens RANBP3 IRES (SEQ ID NO: 1340), a pestivirus giraffe 1 IRES (SEQ ID NO: 1341), a Homo sapiens TGIF1 IRES (SEQ ID NO: 1342), a human poliovirus 1 mahoney IRES (SEQ ID NO: 1343), a foot-and-mouth disease virus type O IRES (SEQ ID NO: 1344), an encephalomyocarditis virus 7A IRES (SEQ ID NO: 1345), an encephalomyocarditis virus 6A IRES (SEQ ID NO: 1346), an enterovirus 71 IRES (SEQ ID NO: 1347), and a coxsackievirus B3 IRES (SEQ ID NO: 1348), wherein the T nucleotides are U nucleotides in the RNA construct.

[0072] In some embodiments, the 3′ UTR sequence is selected from the group consisting of mtRNR1-AES 3′ UTR (SEQ ID NO: 1354), mtRNR1-LSP1 3′ UTR (SEQ ID NO: 1355), AES-mtRNR1 3′ UTR (SEQ ID NO: 1356), AES-hBg 3′ UTR (SEQ ID NO: 1357), FCGRT-hBg 3′ UTR (SEQ ID NO: 1358), 2hBg 3′ UTR (SEQ ID NO: 1359), and HBA1 3′ UTR (SEQ ID NO: 1360), wherein the T nucleotides are U nucleotides in the RNA construct.

[0073] In some embodiments, the 3′ UTR sequence comprises a WPRE sequence. In some embodiments, the WPRE sequence comprises the nucleic acid sequence of SEQ ID NO: 1353, wherein the T nucleotides are U nucleotides in the RNA construct.

[0074] In some embodiments, the poly(A) sequence is positioned 3′ of the WPRE sequence.

[0075] In some embodiments, the poly(A) sequence has a length ranging from about 5 to about 1000 adenine nucleotides. In some embodiments, the poly(A) sequence has a length ranging from about 5 to about 300 adenine nucleotides.

[0076] In some embodiments, a portion of the first ligation sequence is complementary to a portion of the second ligation sequence.

[0077] In some embodiments, the first and/or the second ligation sequence comprises a nucleic acid sequence having at least 90% sequence identity of 5′ AACCAUGCCGACUGAUGGCAG 3′ (SEQ ID NO: 1413).

[0078] In some embodiments, the first and/or the second ligation sequence comprises a nucleic acid sequence having at least 90% sequence identity of 5′ CUGCCAUCAGUCGGCGUGGACUGUAG 3′ (SEQ ID NO: 1415).

[0079] In some embodiments, the circular RNA construct comprises one or more modified nucleic acids.

[0080] In some embodiments, the cell is an engineered cell.

[0081] In some embodiments, the cell lacks any one of the DNA constructs described herein and lacks any one of the linearized ribozyme-RNA construct described herein.

[0082] Provided herein is a ribozyme RNA-construct(s) comprising from 5′ to 3′: an optional primer region, an optional barcode region, a first ribozyme domain, a first ligation stem domain, a payload domain, a second ligation stem domain, and a second ribozyme domain; wherein the payload domain comprises from 5′ to 3′: an internal ribosome entry site (IRES) or a P2A peptide coding sequence, a coding sequence of at least one polypeptide and/or nucleic acid of interest, and a 3′UTR sequence; wherein the transcription of the payload domain is activated by or dependent upon the activity of the one or more ribozymes.

[0083] In some embodiments, the first and second ligation stem domains are from 30 to 60 bp in length. In some embodiments, the first and second ligation stem domains are from 40 to 50 bp in length.

[0084] In some embodiments, the first and second ribozymes are selected from the group consisting of a twister ribozyme, a hammerhead ribozyme, a hatchet ribozyme, a hepatitis delta virus ribozyme, a ligase ribozyme, a pistol ribozyme, a twister sister ribozyme, a Vg1 ribozyme, a VS ribozyme and derivatives of any of the foregoing.

[0085] In some embodiments, the first and second ribozymes are twister ribozymes.

[0086] In some embodiments, the first ribozyme is a P3 twister ribozyme.

[0087] In some embodiments, the second ribozyme is a P1 twister ribozyme.

[0088] In some embodiments, the first ligation stem domain comprises a 5′-OH end, the second ligation stem domain comprises a 2′, 3′-cyclic phosphate end, and wherein the first and second ligation stem domains form a stem substrate for an RNA ligase.

[0089] In some embodiments, the RNA ligase is RtcB.

[0090] In some embodiments, the payload or the at least one polypeptide of interest comprises a zinc finger or CRISPR-Cas9 coding sequence. In a further embodiment, the payload comprises a polypeptide having endonuclease activity and comprises a sequence having at least 85% sequence identity (e.g., 85%, 87%, 90%, 92%, 95%, 98%, 99% or 100%) to SEQ ID NO:1439 and has a mutation selected from the group consisting of L513T, L622Q, and a combination of L513T and L622Q, wherein the polypeptide can perform editing activity (e.g., endonuclease activity) with CRISPR In another embodiment, the Cas9 variant has a sequence of SEQ ID NO:1439 with 1-10 (e.g., 1, 2, 3, 4, 5, 6, 7, 8, 9, or 10) conservative amino acid substitutions and has an L513T, L622Q or an L513T and L622Q mutation, wherein the polypeptide can perform editing activity (e.g., endonuclease activity) with CRISPR

[0091] In another embodiment, the payload domain or the at least one polypeptide of interest comprise a sequence that encodes a polypeptide/protein selected from insulin, clotting factor IX, the cystic fibrosis transmembrane conductance regulator protein, and the dystrophin protein.

[0092] In some embodiments, the ribozyme RNA-construct(s) is linearized.

[0093] In some embodiments, the 3′ UTR comprises a Woodchuck Hepatitis Virus Postranslational Regulatory Element (WPRE).

[0094] In some embodiments, the WPRE is followed by a poly(A) stretch.

[0095] In some embodiments, the 3′ UTR sequence is selected from the group consisting of an mtRNR1-AES 3′ UTR (SEQ ID NO: 1354), an mtRNR1-LSP1 3′ UTR (SEQ ID NO: 1355), an AES-mtRNR1 3′ UTR (SEQ ID NO: 1356), an AES-hBg 3′ UTR (SEQ ID NO: 1357), an FCGRT-hBg 3′ UTR (SEQ ID NO: 1358), a 2hBg 3′ UTR (SEQ ID NO: 1359), and a HBA1 3′ UTR (SEQ ID NO: 1360), wherein the T nucleotides are U nucleotides in the RNA construct.

[0096] In some embodiments, the first and/or the second ligation stem domain comprises a nucleic acid sequence having at least 90% sequence identity of 5′ AACCAUGCCGACUGAUGGCAG 3′ (SEQ ID NO: 1413).

[0097] In some embodiments, the first and/or the second ligation stem domain comprises a nucleic acid sequence having at least 90% sequence identity of 5′ CUGCCAUCAGUCGGCGUGGACUGUAG 3′ (SEQ ID NO: 1415).

[0098] In some embodiments, the WPRE sequence comprises the nucleic acid sequence of SEQ ID NO: 1353.

[0099] In some embodiments, the RES sequence is selected from the group consisting of a cricket paralysis virus IRES (SEQ ID NO: 1330), a Homo sapiens IGF2 IRES (SEQ ID NO: 1331), a hepatovirus A IRES (SEQ ID NO: 1332), a hepatitis C virus H77 isolate IRES (SEQ ID NO: 1333), a Homo sapiens FGF1 IRES (SEQ ID NO: 1334), a bovine viral diarrhea virus 1 IRES (SEQ ID NO: 1335), a human rhinovirus A89 IRES (SEQ ID NO: 1336), a pan paniscus LIMA1 (SEQ ID NO: 1337), a human adenovirus 2 IRES (SEQ ID NO: 1338), a Montana myotis leukoencephalitis virus IRES (SEQ ID NO: 1339), a Homo sapiens RANBP3 IRES (SEQ ID NO: 1340), a pestivirus giraffe 1 IRES (SEQ ID NO: 1341), a Homo sapiens TGIF1 IRES (SEQ ID NO: 1342), a human poliovirus 1 mahoney IRES (SEQ ID NO: 1343), a foot-and-mouth disease virus type O IRES (SEQ ID NO: 1344), an encephalomyocarditis virus 7A IRES (SEQ ID NO: 1345), an encephalomyocarditis virus 6A IRES (SEQ ID NO: 1346), an enterovirus 71 IRES (SEQ ID NO: 1347), and a coxsackievirus B3 IRES (SEQ ID NO: 1348), wherein the T nucleotides are U nucleotides in the RNA construct.

[0100] In some embodiments, a vector or plasmid comprises any one of the ribozyme RNA-construct(s) described located downstream of an RNA promoter.

[0101] In some embodiments, the RNA promoter is a polymerase III promoter.

[0102] In some embodiments, the polymerase III promoter is a hU6 promoter.

[0103] In some embodiments, the first and second ligation stem domains are substrates of naturally occurring ligases in situ. In some embodiments, the naturally occurring ligase is RtcB.

[0104] In some embodiments, at least one polypeptide of interest comprises two or more polypeptides of interest separated by a self-cleaving peptide.

[0105] In some embodiments, the self-cleaving peptide comprises a 2A- or 2A-like-peptide.

[0106] In some embodiments, at least one polypeptide of interest is selected from the group consisting of a prodrug activating enzyme, a biological response modifier, a receptor ligand, an immunoglobulin derived binding polypeptide, a non-immunoglobulin binding polypeptide, an antigenic polypeptide, a genome editing enzyme, and any combination thereof wherein multiple polypeptides are separated by a 2A or 2A-like peptide.

[0107] In some embodiments, biological response modifier or an immunopotentiating cytokine.

[0108] In some embodiments, the immunopotentiating cytokine is selected from the group consisting of interleukins 1 through 38, interferon, tumor necrosis factor (TNF), and granulocyte-macrophage-colony stimulating factor (GM-CSF).

[0109] In some embodiments, the 2A- or 2A-like peptide further comprises a GSG linker moiety.

[0110] In some embodiments, the genome editing enzyme is selected from the group consisting of a zinc finger nuclease, a transcription activator-like effector nuclease (TALEN), an engineered meganuclease and an RNA-guided DNA endonuclease (Cas) polypeptide.

[0111] In some embodiments, the 5′ and 3′ ribozyme sequences are independently selected from a sequence that is at least 85-100% identical to 5′-GCCATCAGTCGCCGGTCCCAAGCCCGGATAAAATGGGAGGGGGCGGGAAACCGC CT-3′ (SEQ ID NO:1349) or 5′-AACACTGCCAATGCCGGTCCCAAGCCCGGATAAAAGTGGAGGGTACAGTCCACG C-3′ (SEQ ID NO:1350), wherein T can be U.

[0112] In some embodiments, the first and second ligation stem domains are independently selected from a sequence that is at least 85-100% identical to 5′-AACCATGCCGACTGATGGCAG-3′ (SEQ ID NO:1351) or 5′-CTGCCATCAGTCGGCGTGGACTGTAG-3′ (SEQ ID NO:1352).

[0113] Also provided is an RNA or DNA vector comprising any one of the ribozyme RNA-construct(s) or any one of the DNA constructs described herein.

[0114] In some embodiments, the vector is a viral vector. In some embodiments, the viral vector is a replicating or non-replicating retroviral vector. In some embodiments, the viral vector is an adenoviral vector, an adeno-associated viral vector (AAV), or a lentiviral vector. In some embodiments, the adenoviral vector is selected from the group consisting of AAV1 serotype, an AAV2 serotype, AAV3 serotype, an AAV4 serotype, AAV5 serotype, an AAV6 serotype, AAV7 serotype, an AAV8 serotype, an AAV9 serotype, a derivative of any of these.

[0115] Provided herein is a circular RNA construct obtain by in vitro transcription of any one of the DNA constructs or any one of the ribozyme activated RNA-constructs described herein.

[0116] In some embodiments, the construct comprises a duplex of the first and second ligation stem domains and (i) an internal ribosome entry site (IRES) or a P2A peptide coding sequence, (ii) a coding sequence of at least one polypeptide and/or nucleic acid of interest, and (iii) a 3′UTR sequence.

[0117] In some embodiments, the at least one polypeptide of interest is selected from the group consisting of a prodrug activating enzyme, a biological response modifier, a receptor ligand, an immunoglobulin derived binding polypeptide, a non-immunoglobulin binding polypeptide, an antigenic polypeptide, a genome editing enzyme, and any combination thereof wherein multiple polypeptides are separated by a 2A or 2A-like peptide.

[0118] In some embodiments, the circular RNA construct comprises a coding region for a gene editing polypeptide and a nucleic acid guide sequence.

[0119] Also provided is a pharmaceutical composition comprising any one of the RNA constructs, any one of the vectors or any one of the circular RNA constructs described herein, and a pharmaceutically acceptable carrier.

[0120] Also provided is a host cell comprising any one of the RNA constructs, any one of the vectors, or any one of the circular RNA constructs described herein.

[0121] In some embodiments, the host cell is a eukaryotic cell.

[0122] In some embodiments, the ribozyme RNA construct, the vector or the circular RNA construct is episomal.

[0123] In some embodiments, the circular RNA constructs edits the genome or an expressed RNA in the host cell.

[0124] Also provided is a vaccine composition comprising any one of the ribozyme RNA-construct(s) described herein, wherein the ribozyme RNA-construct(s) is linearized and comprises: a 5′ ribozyme; a 5′ ligation sequence; an internal ribosome entry site (IRES) sequence; an RNA coding sequence for at least one antigenic polypeptide; a 3′UTR sequence; a 3′ ligation sequence; and a 3′ ribozyme sequence, and a pharmaceutically acceptable carrier.

[0125] Provided is a vaccine composition comprising the RNA construct described herein, wherein the coding sequence encoding a polypeptide of interest encodes for an antigenic polypeptide.

[0126] Also provided is a polypeptide having improved CRISPR-Cas editing efficiency. The polypeptide has improved Cas9 editing efficiency compared to the wildtype Cas9 of SEQ ID NO:1439. The polypeptide has at least 85% sequence identity (e.g., 85%, 87%, 90%, 92%, 95%, 98%, 99% or 100%) to SEQ ID NO:1439 and has a mutation selected from the group consisting of L513T, L622Q, and a combination of L513T and L622Q, wherein the polypeptide can perform editing activity (e.g., endonuclease activity) with CRISPR In a further embodiment, the polypeptide can have 5-6 additional mutations selected from the group consisting of (i) Y285Q, L726G, L815D, L1244G and L1281A; and (b) Y285Q, S367C, L726G, L815D, L1244G and L1281A. In another embodiment, the polypeptide has a sequence of SEQ ID NO:1439 with 1-10 (e.g., 1, 2, 3, 4, 5, 6, 7, 8, 9, or 10) conservative amino acid substitutions and has an L513T, L622Q or an L513T and L622Q mutation, wherein the polypeptide can perform editing activity (e.g., endonuclease activity) with CRISPR. In a further embodiment, the polypeptide can have 5-6 additional mutations selected from the group consisting of (i) Y285Q, L726G, L815D, L1244G and L1281A; and (b) Y285Q, S367C, L726G, L815D, L1244G and L1281A. Additional Cas9 mutants are provided in FIGS. 5B and 14B (e.g., mutant V3, V4 and V5).

[0127] The disclosure also provides a method of treating a subject with a genetic mutation comprising contacting the subject with a icRNA comprising a sequence encoding a CRISPR-Cas9 or variant thereof. In one embodiment, the Cas9 variant comprises a sequence that has at least 85% sequence identity (e.g., 85%, 87%, 90%, 92%, 95%, 98%, 99% or 100%) to SEQ ID NO:1439 and has a mutation selected from the group consisting of L513T, L622Q, and a combination of L513T and L622Q, wherein the polypeptide can perform editing activity (e.g., endonuclease activity) with CRISPR In a further embodiment, the polypeptide can have 5-6 additional mutations selected from the group consisting of (i) Y285Q, L726G, L815D, L 1244G and L 1281A; and (b) Y285Q, S367C, L726G, L815D, L 1244G and L 1281A. In another embodiment, the Cas9 variant has a sequence of SEQ ID NO:1439 with 1-10 (e.g., 1, 2, 3, 4, 5, 6, 7, 8, 9, or 10) conservative amino acid substitutions and has an L513T, L622Q or an L513T and L622Q mutation, wherein the polypeptide can perform editing activity (e.g., endonuclease activity) with CRISPR In a further embodiment, the polypeptide can have 5-6 additional mutations selected from the group consisting of (i) Y285Q, L726G, L815D, L 1244G and L 1281A; and (b) Y285Q, S367C, L726G, L815D, L 1244G and L 1281A.

[0128] Utilizing work on autocatalytic RNA circularization, circular RNAs for programmable RNA editing have been engineered and previously described. The primary approach for generating these circular guide RNAs was via delivery of encoding DNA molecules where the guide RNAs were expressed using pol-III promoters, and thereby were both generated and circularized in cells. However, in vitro transcribed RNAs delivered in linear form successfully circularize in situ in cells upon entry and were similarly functional as guide RNAs. Motivated by the simplicity of this latter approach, and its compatibility with routine in vitro synthesis and purification processes, it was explored if Since this latter approach is more simplistic and is compatible with routine in vitro synthesis and purification processes, this framework was used to generate circular messenger RNAs, which, as described herein, showed that engineered in situ gircularized RNAs (icRNAs) enable extensive protein translation. Data provided herein demonstrate the versatility of icRNAs (such as linear forms of RNA molecules that circularize in situ in cells and the resulting in situ circularized RNA molecules) via a range of in vitro and in vivo applications spanning from RNA vaccines to genome and epigenome targeting.

### DESCRIPTION OF DRAWINGS

[0129] FIGS. 1A-1E show robust protein translation via icRNAs, and application to RNA vaccines and genome editing. (a) Schematic describing the production of icRNAs. In this embodiment, the icRNAs are generated via in vitro transcription of linear RNAs that bear a twister ribozyme flanked by, e.g., internal ribosome entry site (IRES) coupled to a messenger RNA of interest (e.g., a payload comprising an IRES, coding sequence, and 3′UTR). Once transcribed (e.g., into a linear IVT RNA), the flanking twister ribozymes rapidly self-cleave, enabling hybridization of the complementary ligation stems to one another, and upon delivery into cells, these linear RNAs (also referred to as linear icRNA herein) are then circularized in situ by the ubiquitous RNA ligase RtcB to produce the circular icRNA. In the in situ circularization form, translation of the payload occurs, therefore expressing the protein encoded by the payload. (b) GFP mRNA expression over time for cells transfected with linear icRNA (delivered in a linear format but then circularized once delivered into a cell to generate circular icRNA in the cell) and linear in situ Circularization #effective RNAs (linear icdRNAs) is shown. HEK293T cells were transfected with GFP icRNA (delivered in a linear format icRNA but then circularized once delivered into a cell to produce circular icRNA; circle) and linear icdRNA (square) and GFP mRNA amount was measured over time. The 6-hour time point was included to assess initial RNA input (left panel, n=3, p=0.414; t-test, two-tailed). Data from days 1, 2, and 3 illustrate persistence of icRNA (middle panel). Values represented as mean±SEM (n=3, p=0.000143 for day 1, p<0.0001 for day 2, p<0.0001 for day 3 t-test, two-tailed). Values were normalized to the 6-hour time point. GFP protein expression was largely gone by day 3 in linear icdRNA (right panels). (c) RT-PCR based confirmation of circularization of the linear icRNA in cells by detection of circular icRNA. (d) Lipid nanoparticles containing linear icRNA or linear icdRNA in which the payload for both was the COVID Omicron spike were injected intramuscularly into Balb/c mice. After 21 days, sera was isolated from mice and IgG antibody production against the spike protein was quantified by ELISA. Values represented as mean+/−SEM (n=6, p=0.0005 for 2 μg icRNA compared to 2 μg icdRNA; one-way ANOVA, post-hoc Tukey test). (e) Editing efficiency of zinc finger nucleases targeting the GFP and CCR5 genes delivered as a linear icRNA and linear icdRNA. Values represented as mean+/−SEM (n=3, p=0.0051 for GFP and p<0.0001 for CCR5; unpaired t-test, two tailed).

[0130] FIGS. 2A-2G show LORAX protein engineering methodology to screen progressively de-immunized Cas9 variants, and their delivery to a cell as linear icRNAs to generate circular icRNAs in the cell. (a) Schematic of the LORAX protein engineering methodology. A lentiviral library containing Cas9 variants and a sgRNA targeting the HPRT1 gene are delivered into HeLa cells. After treatment with 6TG to remove cells containing non-functional variants, genomic DNA is isolated and Cas9 variant sequences are amplified. Sequences are then read using long-range nanopore sequencing to identify hits. (b) Library construction schematic where mutated epitopes across the Cas9 backbone are identified. The Cas9 sequence was broken up into smaller blocks, such that each block contained no more than 3 or 4 epitopes. The variant library was then assembled by mixing these blocks at equal concentration, generating variants that contained mutated epitopes throughout the sequence. (c) Replicate correlation of post-screen library element frequencies. (d) Network reconstruction connecting Cas9 variants with similar mutational patterns. Circles in red represent tested variants and labeled with their respective names. (e) HEK293T cells were transduced with the GFP coding sequence disrupted by the insertion of a stop codon and a 68-bp genomic fragment of the AAVS1 locus. Wildtype (WT) or Cas 9 variants, a sgRNA targeting the AAVS1 locus, and a donor plasmid capable of restoring GFP function via homology directed repair (HDR) were introduced (transfected) into the cell line and flow cytometry was performed on day 3 to validate Cas9 variants identified in the screen via relative quantification of GFP expression restored by HDR. Values represented as mean±SEM (n=3). (f) Linear icRNA for Cas9 wildtype or variant V4, along with a sgRNA targeting the AAVS1 locus, was introduced into HEK293T and K562 cells, in which these linear icRNA were circularized to produce corresponding circular icRNAs in these cells. Editing efficiency at the AAVS1 locus in the two cell lines are plotted. Values represented as mean±SEM (n=3). (g) Linear icRNA for CRISPRoff wildtype or variant V4, along with a sgRNA targeting the B2M gene, were introduced into HEK293T cells, wherein the linear icRNA circularized in the HEK293T cells to produce circular icRNA. B2M gene repression of CRISPRoff constructs in the presence or absence of sgRNA was plotted. Values represented as mean±SEM (n=3).

[0131] FIGS. 3A-3C provides engineering of the icRNA to improve translation, in vivo delivery, and circularization of icRNA upon delivery to a cell. (a) a panel of IRES sequences, ligation stems, and 3′ untranslated regions (UTRs) (sequences of FIGS. 17A-17C) were screened to optimize protein translation (b) Characterization of lipid nanoparticles (LNPs) encapsulating linear icRNA by dynamic light scattering. No differences in size were observed for LNPs containing circular icRNA (solid line) or linear icdRNA (dotted line). (c) LNPs containing either circular icRNA (circle) or linear icdRNA (square) were retro orbitally injected into C57BL/6J mice, in which the linear icRNA circularized to produce circular icRNA in cells after injection, and RNA was isolated from livers on days 3 and 7. mRNA expression from circular icRNA or linear icdRNA at days 3 and 7, and RT-PCR based confirmation of delivered linear icRNA circularization in vivo to produce the circular icRNA. The ratio of circular RNA detected normalized to icRNA day 3 expression was plotted (n=3). RT-PCR confirmed circular icRNA persistence.

[0132] FIGS. 4A-4D presents screening results from the LORAX method. (a) Immunogenicity scores for Cas orthologs, demonstrating reduced immunogenicity as the number of mutated epitopes increase. (b) Presence of HPRT1 converts 6TG into a toxic byproduct. HeLa cells transduced with wildtype Cas9 and either a HPRT1 targeting or nontargeting (NTC) guide. Only cells where the HPRT1 gene is disrupted are capable of living in various concentrations of 6TG. 6 μg/mL 6TG was used for the screen due to no cells being present in the NTC group. (c) Variant Cas9 sequences were amplified from the plasmid library or genomic DNA post-screen. Long-read nanopore sequencing was performed and the mutational density distribution for the predicted library, the constructed Cas9 variant library, and the two replicates post-screen are plotted. (d) Cas9 block composition and pre- and post-screen allele frequencies at each of the 18 mutational sites. Each block and site shows enrichment of the wild-type allele, but all sites retain a substantial fraction of mutant alleles.

[0133] FIGS. 5A-5C presents functional validation of progressively de-immunized Cas9 variants identified using LORAX. (a) Correlation between the fold change of a Cas9 variant and neighboring variants that share similar mutational patterns. It shows the correlation between the fold change of a Cas9 variant and its predicted fold-change based on a k-nearest neighbors regression. Neighboring variants are those that share similar mutational patterns. The strong correlation suggests a smooth fitness landscape in which variants with similar mutation patterns will be more similar in fitness, on average, than those with divergent mutation patterns. (b) Cas9 wildtype or variants V1-20 and sgRNA targeting the AAVS1 locus were introduced into HEK293T cells. NHEJ mediated editing efficiency of the AAVS1 locus was quantified via NGS for Cas9 WT and variants V1-20 is plotted and the accompanying mutational profiles for all variants is included. Variant genotypes are listed in the lower panel. (c) Predicted reduction in immunogenicity based on the epitope mutated and the HLA typing is depicted for each mutation included in the screen.

[0134] FIGS. 6A-6C presents further characterization of genome and epigenome editing capable with Cas9 variants V3, V4, and V5. (a) Cas9 wildtype or variants V3, V4, or V5, along with sgRNAs targeting the respective genes, were introduced into HEK293T and K562 cells. Editing efficiency of variants across 4 additional genes in HEK293T and 5 gene loci in K562 is plotted. (b) ASCL1 mRNA expression in cells transfected with dCas9 WT-VPR or dCas9 V4-VPR and sgRNA or no sgRNA is shown. Values represented as mean±SEM (n=3). (c) CXCR4 mRNA expression for cells transfected with dCas9 WT-KRAB or dCas9 V4-KRAB and sgRNA or no sgRNA. Values represented as mean±SEM (n=3).

[0135] FIGS. 7A-7G show engineering and characterization of icRNAs. (a) Schematic describing the production of icRNAs. These are generated via in vitro transcription of linear RNAs that bear a twister ribozyme flanked internal ribosome entry site (IRES) coupled to a messenger RNA of interest and a 3′UTR. Once transcribed, the flanking twister ribozymes rapidly self-cleave, enabling hybridization of the complementary ligation stems to one another, and upon delivery into cells, these linear RNAs (also referred to herein as linear icRNA) are then circularized in situ by the ubiquitous RNA ligase RtcB to produce a circular RNA (also referred to herein as a circular icRNA). After in situ circularization, translation of the payload occurs, therefore expressing the protein encoded by the payload. (b) HEK293T cells were transfected with GFP icRNA (delivered in a linear icRNA but then circularized once delivered into a cell to produce circular icRNA; circle) and linear icdRNA (square) and GFP mRNA amount was measured over time. The 6-hour time point was included to assess initial RNA input (left panel, n=3, p=0.414; t-test, two-tailed). Data from days 1, 2, and 3 illustrate persistence of icRNA (middle panel). Values represented as mean±SEM (n=3, p=0.000143 for day 1, p<0.0001 for day 2, p<0.0001 for day 3 t-test, two-tailed). Values were normalized to the 6-hour time point. GFP protein expression was largely gone by day 3 in linear icdRNA transfected cells (right panel). (c) RT-PCR based confirmation of linear icRNA in situ circularization in cells to produce the detected circular icRNA. (d) HEK293 Ts were transfected with linear icRNAs containing various IRES sequences, which were circularized after transfection to generate circular icRNA, and then GFP intensity was quantified by flow cytometry. Circular icRNAs containing the encephalomyocarditis virus IRES (the third bar from the right, corresponding to x-axis label 17) and coxsackievirus B3 IRES (the bar farthest to the right, corresponding to x-axis label 19) were selected for further engineering. Values represented as mean±SEM (n=3). (e) HEK293 Ts were transfected with linear icRNAs containing the encephalomyocarditis virus IRES coupled with various 3′ untranslated regions, and poly(A) stretches (blue bars, #3-13), which were circularized after transfection to generate circular icRNA, and GFP intensity was quantified by flow cytometry. Addition of a Woodchuck Hepatitis Virus Posttranscriptional Regulatory Element (WPRE) and a poly(A) stretch significantly improved protein translation, and icRNAs bearing these and either EMCV IRES or CVB3 IRES (green bar, #14) were used for all subsequent studies. These designs were also compared with IRES and 3′ untranslated regions from Chen et al. (gray bars, #15-16), and commercially capped linear RNA produced by Trilink Biotechnologies (red bar, #17). Values represented as mean±SEM (n=3). (f) HEK293 Ts were transfected with linear icRNA (for circularization after transfection to produce circular icRNA in the HEK293 Ts) or pre-circularized icRNA, and RNA was isolated at various time points. The left panel shows a schematic of delivery of (1) a linear icRNA into a cell such that the icRNA undergoes in situ circularization to form a circular icRNA and (2) a linear icRNA undergoing in vitro circularization to form a pre-circ RNA. The pre-circ RNA can be delivered into a cell. RT-PCR was performed and the ratio of the circular icRNA band to pre-circularized icRNA band was plotted to evaluate in situ circularization efficiencies. The relative circularization efficiency % is shown in the bar graph—data for EMCV IRES containing icRNA and pre-circ RNA is represented in the left bar for each timepoint) or CVB3 IRES containing icRNA and pre-circ RNA is represented in the (right bar for each timepoint). Values represented as mean±SEM (n=3). (g) Sanger sequencing trace mapping the junction site formed upon ligation of the left (underlined in brown; 10 nucleotides on left of trace map) and right (underlined in red; 5 nucleotides on right of trace map) stems.

[0136] FIGS. 8A-8E show assessment of circular icRNA persistence in in vitro and in vivo settings. (a) Post differentiation of stem cells into cardiomyocytes, linear icRNA (circular icRNA was generated in the cardiomyocytes after transfection) or linear commercial RNA were transfected into cells and images were taken over three weeks. Normalized GFP expression over time was plotted for circular icRNA comprising an EMCV IRES, GFP, WPRE, and 165 poly(A) stretch (“EMCV”; see top data line), circular icRNA comprising an CVB3 IRES, GFP, WPRE, and 165 poly(A) stretch (“CVB3”; see middle data line), and linear RNA comprising GFP (“Linear”; see bottom data line). Values represented as mean±SEM (n=3). (b) Representative images are shown illustrating circular icRNA persistence in cardiomyocytes from part (a). (c) Lipid nanoparticles containing linear icRNA comprising either the EMCV IRES or CVB3 IRES and either further comprising 5% N6-methyladenosine (m6A) modification if present (“EMCV m6A” or “CBV3 m6A”) or not comprising 5% N6-methyladenosine (m6A) modification (“EMCV unmodified” or “CBV3 unmodified”) (circular icRNA was generated from these linear icRNAs in cells after delivery) or linear mRNA, each encoding for human erythropoietin (EPO), were retro orbitally injected into C57BL/6J mice and serum was isolated from mice on day 1, 2, 3, 4, and 7. EPO protein expression was assessed by ELISA. Expression normalized to day 1 for each respective group is plotted (n=3). In the graph at day 2, the bottom data point show “Linear”, the middle data points show “EMCV unmodified” and “CBV3 unmodified”, and the top data points show “EMCV m6A” and “CBV3 m6A”. (d) EPO RNA expression in the liver after 7 days normalized to EMCV circular icRNA was quantified by qPCR and plotted (n=3). (e) RT-PCR confirmed in vivo circularization of linear EMCV icRNA constructs and linear CVB3 icRNA constructs to produce circular EMCV icRNA and circular CVB3 icRNA (farthest right two lanes).

[0137] FIGS. 9A-9C show application of icRNAs to zinc finger mediated genome targeting. Editing efficiency of circular icRNA or linear icdRNA zinc finger nucleases targeting a stably integrated GFP gene or the endogenous CCR5 gene in HEK293T cells is plotted. Values represented as mean±SEM (n=3). (b) Repression efficiency of zinc finger KRAB proteins produced by circular icRNA in HeLa cells is plotted on the left as hPCSK9 expression fold change relative to the circular GFP icRNA quantified with RT-qPCR after 48 hours. The green (bottom) dotted line indicates the measure for successful repression of hPCSK9 by a human zinc finger KRAB protein. hPCSK9 expression fold change of concurrent delivery of three human zinc finger KRAB proteins (28_R, 131_R, and 402; n=3) delivered as circular icRNAs relative to a circular GFP icRNA control (n=3) is plotted on the right (p=0.0127; t-test, two-tailed). (c) Repression efficiency in vivo of three screened mouse zinc finger KRAB proteins delivered concurrently as circular icRNA retro orbitally injected into C57BL/6J mice is plotted on the right (n=3, p=0.056; t-test) quantified by RT-qPCR on RNA extracted from livers.

[0138] FIG. 10 shows the LORAX protein engineering methodology to screen progressively deimmunized Cas9 variants. (Left panel: library design) Low-frequency SNPs that have limited effect on Cas9 function were identified and immunogenicity was evaluated in silico using the netMHC epitope prediction software to identify candidate mutations. This analysis was performed for many Cas9 orthologs. Mutations were generated such that two bps were changed to account for Nanopore sequencing accuracy. A library was then generated by fusion PCR of blocks containing wildtype and mutations at specific epitopes. Location of epitopes in SpCas9 that were combinatorially mutated and screened is shown. (Right panel: library screen) The screen was performed by transducing HeLa cells with a lentiviral library containing the Cas9 variants and a guide that cuts the HPRT1 gene. HPRT1 knockout produces resistance to 6-TG. After two weeks, DNA is extracted from surviving cells, Cas9 variant sequences are PCR amplified from the genomic DNA and Nanopore sequenced. High accuracy of variant identification is possible due to the use of two bp mutations for each amino acid change. Post-screen library element frequencies across two independent replicates is shown. Replicate correlation was calculated excluding the over-represented wild-type sequence.

[0139] FIGS. 11A-11F show validation of LORAX screen identified Cas9 variants for de-immunization, and genome and epigenome targeting via delivery as linear icRNAs that subsequently circularize to generate circular icRNAs in cells. (a) Network reconstruction connecting Cas9 variants with similar mutational patterns. Node colors indicate the number of deimmunized epitopes (dark blue <3, light blue=3, white=4, yellow=5, pink >5). Circles in red represent tested variants and labeled with their respective names. (b) HEK293T bearing a GFP coding sequence disrupted by the insertion of a stop codon and a 68-bp genomic fragment of the AAVS1 locus were used as a reporter line. Wildtype (WT) or Cas9 variants, a sgRNA targeting the AAVS1 locus, and a donor plasmid capable of restoring GFP function via homology directed repair (HDR) were transfected into these cells and flow cytometry was performed on day 3. Relative quantification of GFP expression restoration by HDR is plotted. The number in parentheses represents the number of mutations in the variant. Values represented as mean±SEM (n=3). (c) T2 cells were pulsed with wildtype and variant peptides, cultured with PBMCs, and an ELISpot assay was performed to assess PBMC IFN-γ secretion to wildtype and variant peptides. Number of spot forming colonies for each peptide is plotted (n=3, mean±SEM, *p<0.05, **p<0.01, unpaired t-test two-tailed). Red letters in the peptide sequences represent the mutated amino acid. (d) RNA encoding for Cas9 wildtype or variant V4 were electroporated into PBMCs to assess the whole protein immunogenicity. ELISpot assay was performed to assess PBMC IFN-γ secretion to wildtype and variant protein. Number of spot forming colonies for each peptide is plotted (n=3, mean±SEM, ****p<0.0001, unpaired t-test two-tailed). (e) Linear icRNA for Cas9 wildtype or variant V4, along with a sgRNA targeting the AAVS1 locus, were introduced into HEK293T and K562 cells, in which these linear icRNA were circularized to produce corresponding circular icRNAs in these cells. Editing efficiency at the AAVS1 locus in the two cell lines are plotted. Values represented as mean±SEM (n=3). (f) Linear icRNA for CRISPRoff wildtype or variant V4, along with a sgRNA targeting the B2M gene, were introduced into HEK293T cells and subsequently circularized in the HEK293T cells to produce circular icRNA. B2M gene repression of CRISPRoff constructs in the presence or absence of sgRNA is plotted. Values represented as mean±SEM (n=3).

[0140] FIGS. 12A-12E show persistence and immunogenicity of circular icRNAs in vitro and in vivo. (a) HEK293T cells were transfected with linear GFP icRNA containing encephalomyocarditis IRES with WPRE and 50 nt poly(A) stretch (“IRES_ECMV+WPRE+pA50”; circle) or commercial 5′ capped linear RNA (“Trilink”; square), wherein theses linear GFP icRNAs were circularized to generate circular GFP icRNAs in the HEK293T cells, and then the GFP mRNA amount was measured over time (left axis). Values were normalized to the amount at the 6 hour time point for each respective group (n=3, p=0.0072 for day 1, p=0.0015 for day 2, p=0.00086 for day 3, p=0.0037 for day 4, and p=0.000531 for day 5; t-test, two-tailed). The ratio of circular icRNA GFP mRNA compared to linear commercial RNA for each day is plotted (dashed line (“Ratio”); right axis). The increase in value over time illustrates improved persistence of circular icRNA. (b) Characterization of lipid nanoparticles (LNPs) encapsulating linear icRNA by dynamic light scattering. No differences in size were observed for LNPs containing linear icRNA (solid line) or linear icdRNA (dotted line). (c) LNPs containing either linear icRNA (circle) or linear icdRNA (square) were retro orbitally injected into C57BL/6J mice, in which the linear icRNA circularized to produce circular icRNA in cells after injection, and RNA was isolated from livers on days 3 and 7. The ratio of circular RNA detected normalized to icRNA day 3 expression was plotted (n=3). RT-PCR confirmed circular icRNA persistence up to day 7 in vivo. (d) HeLa cells were transfected with modified (5% m6a) and unmodified circular GFP icRNA containing encephalomyocarditis IRES with WPRE and 165 nt poly(A) stretch and 5′ capped modified (pseudo-UTP) and unmodified linear GFP RNA and IL-6, IFNB, and RIG-I mRNA quantities measured via RT-qPCR after 24 hours. For IL-6 data from left to right of the graph, linear unmodified icRNA is in first bar, linear modified icRNA is in second bar, circular unmodified icRNA is in third bar, circular modified icRNA is in fourth bar and untreated cells is in fifth bar. IFNB and RIG-1 data is shown in a similar order. Values were normalized to untreated HeLa samples (n=3, IL-6: p=0.014, 0.014, 0.021, 0.040 respectively, IFNB: p=0.040 for unmodified linear GFP, and n.s. for all other comparisons; 1% FDR, t-test, two-tailed). Trend illustrates a minimal immunogenic response to all constructs except for unmodified linear RNA. Values represented as mean±SEM. (e) LNPs containing modified (pseudo-UTP) linear GFP RNA and modified circular GFP icRNA were retro orbitally injected into C57BL/6J mice, RNA was isolated from livers on day 3, and IL-6 and RIG-I mRNA quantities measured via RT-qPCR. The expression fold change of modified circular GFP icRNA was plotted normalized to modified linear GFP RNA (n=3, p=0.41 for IL-6, p=0.26 for RIG-I; 1% FDR, t-test, two-tailed). Modified linear GFP RNA data is in left bar and modified circular GFP icRNA data is in right bar for IL-6, and also similarly shown for RIG-1. Values represented as mean±SEM.

[0141] FIGS. 13A-13D show the LORAX screen design and results. (a) Immunogenicity scores for Cas orthologs, demonstrating reduced immunogenicity (averaged across HLA types) as the number of mutated epitopes increases. (b) Presence of HPRT1 converts 6TG into a toxic nucleotide analog. HeLa cells transduced with wildtype Cas9 and either a HPRT1 targeting or nontargeting (NTC) guide. Only cells where the HPRT1 gene is disrupted are capable of living in various concentrations of 6TG. 6 μg/mL 6TG was used for the screen as this concentration was sufficient for complete killing of NTC-bearing cells. (c) Variant Cas9 sequences were amplified from the plasmid library or genomic DNA post-screen. Long-read nanopore sequencing was performed and the mutational density distribution for the predicted library, the constructed Cas9 variant library, and the two replicates post-screen are plotted. At 0 mutations along the x-axis, “theoretical” is at bottom, “plasmid” is at middle, and replicate 1 and replicate 2 are at top of the frequency axis. (d) Cas9 block composition and pre- and post-screen allele frequencies at each of the 18 mutational sites. Each block and site shows enrichment of the wild-type allele, but all sites retain a substantial fraction of mutant alleles.

[0142] FIGS. 14A-14B show validations of LORAX screen identified Cas9 variants. (a) Correlation between the fold change of a Cas9 variant and its predicted fold-change based on a k-nearest neighbors regression. Neighboring variants are those that share similar mutational patterns. The strong correlation suggests a smooth fitness landscape in which variants with similar mutation patterns will be more similar in fitness, on average, than those with divergent mutation patterns. (b) Cas9 wildtype or variants V1-20 and sgRNA targeting the AAVS1 locus were introduced into HEK293T cells. NHEJ mediated editing at the AAVS1 locus was quantified via NGS for Cas9 WT and variants V1-20 is plotted. The number in parentheses represents the number of mutations in the variant. Variant genotypes are listed in the lower panel.

[0143] FIGS. 15A-15C show predicted and experimentally confirmed deimmunization across Cas9 epitopes. (a) Predicted mutation-specific reduction in immunogenicity based on the epitope mutated and the HLA typing is depicted for each mutation included in the screen. (b) Technical replicates of spot forming colonies in the ELISpot assay to assess peptide epitope immunogenicity are plotted for each donor (n=4). (c) Technical replicates of spot forming colonies in the ELISpot assay to assess whole protein immunogenicity are plotted for each donor (n=6).

[0144] FIGS. 16A-16D show characterization of Cas9 variants across genome and epigenome targeting assays. (a) Cas9 wild-type or variants V3, V4, or V5, along with sgRNAs targeting the respective genes, were introduced into HEK293T and K562 cells. Editing efficiency of variants across 4 loci in HEK293 Ts and 5 loci in K562s is plotted. WT represented by circle, V3 represented by square, V4 represented by triangle, and V5 represented by diamond. (b) ASCL1 mRNA expression in cells transfected with dCas9 WT-VPR or dCas9 V4-VPR and sgRNA or no sgRNA is shown. Values represented as mean±SEM (n=3). (c) CXCR4 mRNA expression in cells transfected with dCas9 WT-KRAB or dCas9 V4-KRAB and sgRNA or no sgRNA is shown. Values represented as mean±SEM (n=3). (d) Volcano plot demonstrating differentially expressed genes for CRISPRoff wildtype with or without the B2M guide and variant V4 with or without guide. Dotted lines indicate the cutoff for significance (log₂(fold change) greater than 0.5 or less than −0.5 and −log₁₀ p-value greater than 3). B2M downregulation is confirmed by the red dots. Differentially expressed genes found in both wildtype and V4 are labeled with purple dots.

[0145] FIGS. 17A-17C show exemplary embodiments of DNA constructs encoding for icRNA constructs comprising IRES sequences, ligation stem sequences, and 3′ untranslated regions (UTRs). (a) depicts the nucleic acid sequence of a UTR version 1 construct from 5′ to 3′: a T7 promoter, a 5′ twister ribozyme, a 5′ ligation stem sequence, an internal ribosome entry site (IRES), an mRNA of interest (e.g., a GFP payload), a WPRE, a 4 deoxyadenosine stretch (linker), a 3′ ligation stem sequence, a 3′ twister ribozyme, and a stop (poly-T) sequence. (b) depicts the DNA sequence of a UTR version 2 construct from 5′ to 3′: a T7 promoter, a 5′ twister ribozyme, a 5′ ligation stem sequence, an IRES, an mRNA of interest (e.g., a GFP payload), a 4 deoxyadenosine stretch (linker), a 3′ ligation stem, a 3′ twister ribozyme, and a stop (poly-T) sequence. (c) depicts the nucleic acid sequence of a UTR version 3 construct from 5′ to 3′: a T7 promoter, a 5′ twister ribozyme, a 5′ ligation stem sequence, an IRES, an mRNA of interest (e.g., a GFP payload), a WPRE, a poly-A stretch (such as a 31 deoxyadenosine stretch), a 3′ ligation stem sequence, a 3′ twister ribozyme, and a stop (poly-T) sequence. Note that slashes indicate boundaries of the components (e.g., elements, features, and motifs).

[0146] FIGS. 18A-18S show exemplary embodiments of DNA constructs encoding for icRNA constructs comprising the different IRES constructs of Table 1. (a) depicts a cricket paralysis virus (CrPV) IRES construct (SEQ ID NO: 1361). (b) depicts a Homo sapiens IGF2 virus IRES construct (SEQ ID NO: 1362). (c) depicts a hepatovirus A (HAV) IRES construct (SEQ ID NO: 1363). (d) depicts a hepatitis C virus H77 isolate (HCV-H77) IRES construct (SEQ ID NO: 1364). (e) depicts a Homo sapiens FGF1 IRES construct (SEQ ID NO: 1365). (f) depicts a bovine viral diarrhea virus 1 (BVDV-1; also known as pestivirus A) IRES construct (SEQ ID NO: 1366). (g) depicts a human rhinovirus A89 (RV-A89) IRES construct (SEQ ID NO: 1367). (h) depicts a pan paniscus LIMA1 IRES construct (SEQ ID NO: 1368). (i) depicts a human adenovirus 2 (hAdV2) IRES construct (SEQ ID NO: 1369). (j) depicts a Montana myotis leukoencephalitis Virus (MMLV) IRES construct (SEQ ID NO:1370). (k) depicts a Homo sapiens RANBP3 IRES construct (SEQ ID NO: 1371). (l) depicts a pestivirus giraffe 1 IRES construct (SEQ ID NO: 1372). (m) depicts a Homo sapiens TGIF1 IRES construct (SEQ ID NO: 1373). (n) depicts a human poliovirus 1 Mahoney IRES construct (SEQ ID NO: 1374). (o) depicts a foot and mouth disease virus type O (FMDV O) IRES construct (SEQ ID NO: 1375). (p) depicts an encephalomyocarditis virus 7A (EMCV 7A) IRES construct (SEQ ID NO: 1376). (q) depicts an encephalomyocarditis virus 6A (EMCV 6A) IRES construct (SEQ ID NO:1377). (r) depicts an enterovirus 71 (EV71) IRES construct (SEQ ID NO: 1378). (s) depicts a coxsackievirus B3 (CVB3) IRES construct (SEQ ID NO: 1379). The ribozyme sequences and ligation sequences are italicized. The IRES sequences are underlined. The sequences of the polynucleotide encoding the payload (e.g., encoding GFP) are bolded. Note that slashes indicate boundaries of the components (e.g., elements, features, and motifs). Data shown in FIG. 7D are of the Table 1 IRES constructs corresponding to the sequences in FIGS. 18A-18S, which respectively correspond to construct #1-19 of the FIG. 7D.

[0147] FIGS. 19A-19N show exemplary embodiments of DNA constructs encoding for icRNA constructs of Table 2 that have different 3′ UTR constructs. (a) depicts an IRES_Encephalomyocarditis Virus 6A+WPRE construct (SEQ ID NO: 1380). (b) depicts an IRES_Encephalomyocarditis Virus 6A+WPRE+pA50 3′construct (SEQ ID NO: 1381). (c) depicts an IRES Encephalomyocarditis Virus 6A+WPRE+pA120 3′construct (SEQ ID NO: 1382). (d) depicts an IRES Encephalomyocarditis Virus 6A+WPRE+pA165 3′construct (SEQ ID NO: 1383). (e) depicts an IRES Encephalomyocarditis Virus 6A+WPRE+pA165 3′+mtRNR1-AES 3′ UTR construct (SEQ ID NO: 1384). (f) depicts an IRES Encephalomyocarditis Virus 6A+WPRE+pA165 3′+mtRNR1-LSP1 3′ UTR construct (SEQ ID NO: 1385). (g) depicts an IRES Encephalomyocarditis Virus 6A+WPRE+pA165 3′+AES-mtRNR1 3′ UTR construct (SEQ ID NO: 1386). (h) depicts an IRES Encephalomyocarditis Virus 6A+WPRE+pA165 3′+AES-hBg 3′ UTR construct (SEQ ID NO: 1387). (i) depicts an IRES_Encephalomyocarditis Virus 6A+WPRE+pA165 3′+FCGRT-hBg 3′ UTR construct (SEQ ID NO: 1388). (j) depicts an IRES Encephalomyocarditis Virus 6A+WPRE+pA165 3′+2hBg 3′ UTR construct (SEQ ID NO: 1389). (k) depicts an IRES Encephalomyocarditis Virus 6A+WPRE+pA165 3′+HBA1 3′ UTR construct (SEQ ID NO: 1390). (l) depicts an IRES Coxsackievirus B3+WPRE+pA165 3′ (SEQ ID NO: 1391). (m) depicts an icChang AES-mtRNR1 construct (SEQ ID NO: 1392). (n) depicts an icChang HBA1 construct (SEQ ID NO: 1393). The ribozyme sequences and ligation sequences are italicized. The IRES sequences are underlined. The WPRE sequences are double underlined. The poly(A) stretches are italicized and underlined. The 3′ UTR sequences are italicized and double underlined. The sequences of the polynucleotide encoding the payload (e.g., encoding GFP) are bolded. The nucleic acid sequences encoding poly-A binding proteins are italicized and underlined. Note that slashes indicate boundaries of the components (e.g., elements, features, and motifs). Data shown in FIG. 7E are of the 3′ UTR constructs of Table 2 corresponding to the sequences in FIGS. 19A-19N, in which correspond to construct #3-16 of the FIG. 7E (construct #1 and 2 of FIG. 7E correspond to the encephalomyocarditis virus 7A (EMCV 7A) IRES construct (SEQ ID NO:1376) and the encephalomyocarditis virus 6A (EMCV 6A) IRES construct (SEQ ID NO:1377) in Table 1).

### DETAILED DESCRIPTION

### Definitions

[0148] As used herein and in the appended claims, the singular forms “a,” “an,” and “the” include plural referents unless the context clearly dictates otherwise. Thus, for example, reference to “a prodrug” includes a plurality of such prodrugs and reference to “the chemotherapeutic agent” includes reference to one or more chemotherapeutic agents and equivalents thereof known to those skilled in the art, and so forth.

[0149] Also, the use of “or” means “and/or” unless stated otherwise. Similarly, “comprise,” “comprises,” “comprising” “include,” “includes,” and “including” are interchangeable and not intended to be limiting.

[0150] It is to be further understood that where descriptions of various embodiments use the term “comprising,” those skilled in the art would understand that in some specific instances, an embodiment can be alternatively described using language “consisting essentially of” or “consisting of.”

[0151] Unless defined otherwise, all technical and scientific terms used herein have the same meaning as commonly understood to one of ordinary skill in the art to which this disclosure belongs. Although many methods and reagents are similar or equivalent to those described herein, the exemplary methods and materials are disclosed herein.

[0152] All publications mentioned herein are incorporated herein by reference in full for the purpose of describing and disclosing the methodologies, which might be used in connection with the description herein. Moreover, with respect to any term that is presented in one or more publications that is similar to, or identical with, a term that has been expressly defined in this disclosure, the definition of the term as expressly provided in this disclosure will control in all respects.

[0153] It should be understood that this invention is not limited to the particular methodology, protocols, and reagents, etc., described herein and as such may vary. The terminology used herein is for the purpose of describing particular embodiments only and is not intended to limit the scope of the present invention, which is defined solely by the claims.

[0154] Other than in the operating examples, or where otherwise indicated, all numbers expressing quantities of ingredients or reaction conditions used herein should be understood as modified in all instances by the term “about.” The term “about” when used to described the present invention, in connection with percentages means±1%.

[0155] RNAs are a powerful therapeutic class. However their inherent transience impacts their activity both as an interacting moiety as well as a template. Circularization of RNA improves their persistence, however simple and scalable approaches to achieve this are lacking. Utilizing autocatalytic RNA circularization, linear in situ circularized RNAs (icRNAs) were engineered and are described herein. This approach enables icRNA delivery as simple linear RNA that can be circularized upon delivery into the cell, thus making them compatible with routine synthesis, purification, and delivery formulations. Protein translation from circularized icRNAs was confirmed both in vitro and in vivo and their utility in three contexts is demonstrated herein: (1) the SARS-CoV-2 Omicron spike protein was delivered in vivo as linear icRNAs and showed corresponding induction of humoral immune responses; (2) robust genome targeting via zinc finger nucleases delivered as linear icRNAs was demonstrated; and (3) to enable compatibility between persistence of expression and immunogenicity, a long range multiplexed (LORAX) protein engineering methodology was developed to screen progressively deimmunized Cas9 proteins, and demonstrated efficient genome and epigenome targeting via their delivery as icRNAs.

[0156] The terms “administration” and “administering” refer to the act of giving a drug, prodrug, or other agent, or therapeutic treatment (e.g., DNA or RNA polynucleotide) to a subject or in vivo, in vitro, or ex vivo cells, tissues, and organs. Exemplary routes of administration to the human body can be through space under the arachnoid membrane of the brain or spinal cord (intrathecal), the eyes (ophthalmic), mouth (oral), skin (topical or transdermal), nose (nasal), lungs (inhalant), oral mucosa (buccal or lingual), ear, rectal, vaginal, by injection (e.g., intravenously, subcutaneously, intratumorally, intraperitoneally, etc.) and the like.

[0157] As used herein, the term “alphavirus” has its conventional meaning in the art, and includes the various species such as Venezuelan Equine Encephalitis (VEE) Virus, Eastern Equine Encephalitis (EEE) virus, Everglades Virus (EVE), Mucambo Virus (MUC), Pixuna Virus (PIX), and Western Equine Encephalitis Virus, all of which are members of the VEEEEE Group of alphaviruses. Other alphaviruses include, e.g., Semliki Forest Virus (SFV), Sindbis, Ross River Virus, Chikungunya Virus, S.A. AR86, Barmah Forest Virus, Middleburg Virus, O'nyong-nyong Virus, Getah Virus, Sagiyama Virus, Bebaru Virus, Mayaro Virus, Una Virus, Aura Virus, Whataroa Virus, Banbanki Virus, Kyzylagach Virus, Highlands J Virus, Fort Morgan Virus, Ndumu Virus, and Buggy Creek Virus. Alphaviruses particularly useful in the constructs and methods described herein are VEE/EEE group alphaviruses.

[0158] The terms “alphavirus RNA replicon”, “alphavirus replicon RNA”, “alphavirus RNA vector replicon”, “vector replicon RNA” and “self-replicating RNA construct” are used interchangeably to refer to an RNA molecule expressing nonstructural protein genes such that it can direct its own replication (amplification) and comprises, at a minimum, 5′ and 3′ alphavirus replication recognition sequences, coding sequences for alphavirus nonstructural proteins, and a polyadenylation tract. It may additionally contain one or more elements (e.g., IRES sequences, 2A peptide sequence and the like) to direct the expression, meaning transcription and translation, of a coding sequence of interest. The alphavirus replicon of the disclosure can comprise, in one embodiment, 5′ and 3′ alphavirus replication recognition sequences, coding sequences for alphavirus nonstructural proteins, a polyadenylation tract.

[0159] The term “adeno-associated virus” or “AAV” as used herein refers to a member of the class of viruses associated with this name and belonging to the genus depend parvovirus, family Parvoviridae. Multiple serotypes of this virus can be suitable for gene delivery. In some cases, serotypes can infect cells from various tissue types. Examples of AAV serotypes are AAV1, AAV2, AAV3, AAV4, AAV5, AAV6, AAV7, AAV8, AAV9, AAV10, and AAV11. Non-limiting exemplary serotypes useful for the purposes disclosed herein include any of the 11 serotypes, e.g., AAV2 and AAV8.

[0160] As used herein, the term “circularized” and/or “circular” used in the context of a nucleic acid molecule (e.g., an engineered guide RNA) can generally refer to a nucleic acid molecule that can be represented as a polynucleotide sequence in a circular 2-dimensional format with one nucleotide after the other wherein the represented polynucleotide is circular or a closed loop. In some embodiments, a circular nucleic acid molecule does not comprise a 5′ reducing hydroxyl, a 3′ reducing hydroxyl, or both capable of being exposed to a solvent.

[0161] The term “complementary” as used herein refers to Watson-Crick base pairing between nucleotides and specifically refers to nucleotides hydrogen bonded to one another with thymine or uracil residues linked to adenine residues by two hydrogen bonds and cytosine and guanine residues linked by three hydrogen bonds. In general, a nucleic acid includes a nucleotide sequence described as having a “percent complementarity” or “percent homology” to a specified second nucleotide sequence. For example, a nucleotide sequence may have 80%, 90%, or 100% complementarity to a specified second nucleotide sequence, indicating that 8 of 10, 9 of 10 or 10 of 10 nucleotides of a sequence are complementary to the specified second nucleotide sequence. Perfectly complementary” can mean that all the contiguous residues of a nucleic acid sequence will hydrogen bond with the same number of contiguous residues in a second nucleic acid sequence. “Substantially complementary” as used herein can refer to a degree of complementarity that can be at least 60%, 65%, 70%, 75%, 80%, 85%, 90%, 95%. 97%, 98%, 99%, or 100% over a region of 10, 15, 20, 25, 30, 35, 40, 45, 50, or more nucleotides, or can refer to two nucleic acids that hybridize under stringent conditions (i.e., stringent hybridization conditions). Nucleic acids can include nonspecific sequences. As used herein, the term “nonspecific sequence” or “not specific” can refer to a nucleic acid sequence that contains a series of residues that may not be designed to be complementary to or can be only partially complementary to any other nucleic acid sequence.

[0162] The term “encode” as it is applied to polynucleotides can refer to a polynucleotide which is said to “encode” a polypeptide if, in its native state or when manipulated, it can be transcribed and/or translated to produce the mRNA for the polypeptide and/or a fragment thereof. The antisense strand is the complement of such a nucleic acid, and the encoding sequence can be deduced therefrom. In a non-limiting example, an RNA molecule can encode a polypeptide during translation, whereas a DNA molecule can encode an RNA molecule during transcription. The term “encode” also includes the expression of a nucleic acid that when expressed has a biological effect (e.g., guide RNA, antisense molecule, siRNA and the like).

[0163] The terms “equivalent” or “biological equivalent” are used interchangeably when referring to a particular molecule, biological or cellular material having minimal homology while still maintaining desired structure or functionality.

[0164] As used herein, “expression” can refer to the process by which polynucleotides are transcribed into mRNA and/or the process by which the transcribed mRNA is subsequently being translated into peptides, polypeptides, or proteins. If the polynucleotide is derived from genomic DNA, expression can include splicing of the mRNA in a eukaryotic cell.

[0165] “Homology” or “identity” or “similarity” can refer to sequence similarity between two peptides or between two nucleic acid molecules. Homology can be determined by comparing a position in each sequence which can be aligned for purposes of comparison. For example, when a position in the compared sequence is occupied by the same base or amino acid, then the molecules are homologous at that position. A degree of homology between sequences is a function of the number of matching or homologous positions shared by the sequences. An “unrelated” or “non-homologous” sequence shares less than 40% identity, or alternatively less than 25% identity, with one of the sequences of the disclosure.

[0166] Homology can refer to a percent (%) identity of a sequence to a reference sequence. As a practical matter, whether any particular sequence can be at least 50%, 60%, 70%, 80%, 85%, 90%, 92%, 95%, 96%, 97%, 98% or 99% identical to any sequence described herein, such particular peptide, polypeptide or nucleic acid sequence can be determined conventionally using computer programs such the Bestfit program (Wisconsin Sequence Analysis Package, Version 8 for Unix, Genetics Computer Group, University Research Park, 575 Science Drive, Madison, Wis. 53711). When using Bestfit or any other sequence alignment program to determine whether a particular sequence is, for instance, 95% identical to a reference sequence, the parameters can be set such that the percentage of identity is calculated over the full length of the reference sequence and that gaps in homology of up to 5% of the total reference sequence are allowed.

[0167] For example, in a specific embodiment the identity between a reference sequence (query sequence, a sequence of the disclosure) and a subject sequence, also referred to as a global sequence alignment, can be determined using the FASTDB computer program. In some cases, parameters for a particular embodiment in which identity is narrowly construed, used in a FASTDB amino acid alignment, can include: Scoring Scheme=PAM (Percent Accepted Mutations) 0, k-tuple=2, Mismatch Penalty=1, Joining Penalty=20, Randomization Group Length=0, Cutoff Score=1, Window Size=sequence length, Gap Penalty=5, Gap Size Penalty=0.05, Window Size=500 or the length of the subject sequence, whichever is shorter. According to this embodiment, if the subject sequence is shorter than the query sequence due to N- or C-terminal deletions, not because of internal deletions, a manual correction can be made to the results to take into consideration the fact that the FASTDB program does not account for N- and C-terminal truncations of the subject sequence when calculating global percent identity. For subject sequences truncated at the N- and C-termini, relative to the query sequence, the percent identity can be corrected by calculating the number of residues of the query sequence that are lateral to the N- and C-terminal of the subject sequence, which are not matched/aligned with a corresponding subject residue, as a percent of the total bases of the query sequence. A determination of whether a residue is matched/aligned can be determined by results of the FASTDB sequence alignment. This percentage can be then subtracted from the percent identity, calculated by the FASTDB program using the specified parameters, to arrive at a final percent identity score. This final percent identity score can be used for the purposes of this embodiment. In some cases, only residues to the N- and C-termini of the subject sequence, which are not matched/aligned with the query sequence, are considered for the purposes of manually adjusting the percent identity score. That is, only query residue positions outside the farthest N- and C-terminal residues of the subject sequence are considered for this manual correction. For example, a 90 residue subject sequence can be aligned with a 100 residue query sequence to determine percent identity. The deletion occurs at the N-terminus of the subject sequence and therefore, the FASTDB alignment does not show a matching/alignment of the first 10 residues at the N-terminus. The 10 unpaired residues represent 10% of the sequence (number of residues at the N- and C-termini not matched/total number of residues in the query sequence) so 10% is subtracted from the percent identity score calculated by the FASTDB program. If the remaining 90 residues were perfectly matched the final percent identity can be 90%. In another example, a 90 residue subject sequence is compared with a 100 residue query sequence. This time the deletions are internal deletions so there are no residues at the N- or C-termini of the subject sequence which are not matched/aligned with the query. In this case the percent identity calculated by FASTDB is not manually corrected. Once again, only residue positions outside the N- and C-terminal ends of the subject sequence, as displayed in the FASTDB alignment, which are not matched/aligned with the query sequence are manually corrected for.

[0168] The term “hybridization” as used herein refers to the complementary base-pairing interaction of one nucleic acid with another nucleic acid that results in formation of a duplex, triplex, or other higher-ordered structure. In some instances, the event, state, or process includes two complementary single-stranded RNA molecules or portions thereof bonded together to form a double-stranded complex. The term “self-hybridization” as used herein refers to an event or state in which a nucleic acid strand is hybridized to itself, such as hybridized to a portion of itself.

[0169] The term “hybridization” also includes an event, state, or process in which one or more polynucleotides react to form a complex that is stabilized via hydrogen bonding between the bases of the nucleotide residues. The hydrogen bonding can occur by Watson-Crick base pairing, Hoogstein binding, or in any other sequence-specific manner. A hybridization reaction can constitute a step in a more extensive process, such as the initiation of a PC reaction, or the enzymatic cleavage of a polynucleotide by a ribozyme.

[0170] Examples of stringent hybridization conditions include: incubation temperatures of about 25° C. to about 37° C.; hybridization buffer concentrations of about 6×SSC to about 10×SSC; formamide concentrations of about 0% to about 25%; and wash solutions from about 4×SSC to about 8×SSC. Examples of moderate hybridization conditions include: incubation temperatures of about 40° C. to about 50° C.; buffer concentrations of about 9×SSC to about 2×SSC; formamide concentrations of about 30% to about 50%; and wash solutions of about 5×SSC to about 2×SSC. Examples of high stringency conditions include: incubation temperatures of about 55° C. to about 68° C.; buffer concentrations of about 1×SSC to about 0.1×SSC; formamide concentrations of about 55% to about 75%; and wash solutions of about 1×SSC, 0.1×SSC, or deionized water. In general, hybridization incubation times are from 5 minutes to 24 hours, with 1, 2, or more washing steps, and wash incubation times are about 1, 2, or 15 minutes. SSC is 0.15 M NaCl and 15 mM citrate buffer. It is understood that equivalents of SSC using other buffer systems can be employed.

[0171] The terms “increased”, “increase”, “enhanced”, “enhance”, “elevate”, or “elevated” are all used herein to generally mean an increase by a statically significant amount. In some embodiments, the terms refer to an increase of at least 10% as compared to a reference level, for example an increase of at least about 20%, or at least about 30%, or at least about 40%, or at least about 50%, or at least about 60%, or at least about 70%, or at least about 80%, or at least about 90% or up to and including a 100% increase or any increase between 10-100% as compared to a reference level, or at least about a 2-fold, or at least about a 3-fold, or at least about a 4-fold, or at least about a 5-fold or at least about a 10-fold increase, or any increase between 2-fold and 10-fold or greater as compared to a reference level.

[0172] The term “isolated” as used herein can refer to molecules or biologicals or cellular materials being substantially free from other materials. In one aspect, the term “isolated” can refer to nucleic acid, such as DNA or RNA, or protein or polypeptide (e.g., an antibody or derivative thereof), or cell or cellular organelle, or tissue or organ, separated from other DNAs or RNAs, or proteins or polypeptides, or cells or cellular organelles, or tissues or organs, respectively, that are present in the natural source. The term “isolated” also can refer to a nucleic acid or peptide that is substantially free of cellular material, viral material, or culture medium when produced by recombinant DNA techniques, or chemical precursors or other chemicals when chemically synthesized. Moreover, an “isolated nucleic acid” is meant to include nucleic acid fragments which are not naturally occurring as fragments and may not be found in the natural state. In some cases, the term “isolated” is also used herein to refer to polypeptides which are isolated from other cellular proteins and is meant to encompass both purified and recombinant polypeptides. In some cases, the term “isolated” is also used herein to refer to cells or tissues that are isolated from other cells or tissues and is meant to encompass both cultured and engineered cells, or tissues.

[0173] A “ligation sequence”, “ligation stem”, or “ligation stem domain” are used interchangeably herein and refers to a nucleic acid sequence complementary to another nucleic acid sequence, which enables the formation of Watson-Crick base pairing to form suitable substrates for ligation by a ligase, e.g., an RNA ligase. In one embodiment, a 5′ ligation sequence and a 3′ ligation sequence are substrates for an RNA ligase such as, but not limited to RtcB. The 5′ and 3′ ligation sequences when ligated circularize an RNA molecule of the disclosure. Such circularization reduces RNA degradation and improves persistence in vivo.

[0174] As used herein, a “linearized ribozyme activated RNA construct” refers to a construct of the disclosure which has been activated by the activity of ribozymes. In contrast, a “linear ribozyme RNA construct” refers to an RNA construct prior to ribozyme activation. The difference can be identified via the presence of at least the ribozymes present on the RNA construct. For example, a linearized ribozyme activated RNA construct lacks ribozymes, while an unactivated construct includes at least one ribozyme domain.

[0175] “Operably linked” refers to an arrangement of elements where the components so described are configured so as to perform their usual function. Thus, control sequences (e.g., a promoter, enhancer and the like) operably linked to a coding sequence are capable of effecting the transcription, and in some cases, the translation, of a coding sequence. The control sequences need not be contiguous with the coding sequence so long as they function to direct the expression of the coding sequence. Similarly, and internal ribosome entry site can be “operably linked” to a downstream coding sequence such that the coding sequence is properly expressed.

[0176] The terms “polynucleotide” and “oligonucleotide” are used interchangeably and refer to a polymeric form of nucleotides of any length, either deoxyribonucleotides or ribonucleotides or analogs or combinations thereof. Polynucleotides can have any three-dimensional structure and can perform any function. The following are non-limiting examples of polynucleotides: a gene or gene fragment (for example, a probe, primer, EST or SAGE tag), exons, introns, messenger RNA (mRNA), transfer RNA, ribosomal RNA, RNAi, ribozymes, cDNA, recombinant polynucleotides, branched polynucleotides, plasmids, vectors, isolated DNA of any sequence, isolated RNA of any sequence, nucleic acid probes and primers. A polynucleotide can comprise modified nucleotides, such as methylated nucleotides and nucleotide analogs. If present, modifications to the nucleotide structure can be imparted before or after assembly of the polynucleotide. The sequence of nucleotides can be interrupted by non-nucleotide components. A polynucleotide can be further modified after polymerization, such as by conjugation with a labeling component. The term also can refer to both double and single stranded molecules. Unless otherwise specified or required, any embodiment of this disclosure that is a polynucleotide can encompass both the double stranded form and each of two complementary single stranded forms known or predicted to make up the double stranded form. In some embodiments, a polynucleotide can include both RNA and DNA nucleotides.

[0177] The term “polynucleotide sequence” can be the alphabetical representation of a polynucleotide molecule. This alphabetical representation can be input into databases in a computer having a central processing unit and used for bioinformatics applications such as functional genomics and homology searching. In any alphabetic representation, the disclosure contemplates both RNA and DNA (wherein “T” is replaced with “U” or vice-a-versa).

[0178] The term “pharmaceutical composition” refers to the combination of an active ingredient with a carrier, inert or active, making the composition especially suitable for therapeutic, prophylactic, or diagnostic use in vitro, in vivo or ex vivo.

[0179] The terms “pharmaceutically acceptable” or “pharmacologically acceptable,” as used herein, refer to compositions that do not substantially produce adverse reactions, e.g., toxic, allergic, or immunological reactions, when administered to a subject.

[0180] The term “pharmaceutically acceptable carrier” refers to any of the standard pharmaceutical carriers including, but not limited to, phosphate buffered saline solution, water, emulsions (e.g., such as an oil/water or water/oil emulsions), glycerol, liquid polyethylene glycols, aprotic solvents such as dimethyl sulfoxide, N-methylpyrrolidone and mixtures thereof, and various types of wetting agents, solubilizing agents, anti-oxidants, bulking agents, protein carriers such as albumins, any and all solvents, dispersion media, coatings, sodium lauryl sulfate, isotonic and absorption delaying agents, disintegrants (e.g., potato starch or sodium starch glycolate), and the like. The compositions also can include stabilizers and preservatives. For examples of carriers, stabilizers and adjuvants, see, e.g., Martin, Remington's Pharmaceutical Sciences, 21th Ed., MackPubl. Co., Easton, Pa. (2005), incorporated herein by reference in its entirety.

[0181] In certain embodiments, “promoters” may be used to drive transcription of an operably linked nucleic acid. As used herein “promoter” refers to a DNA sequence which contains the binding site for RNA polymerase and initiates transcription of a downstream nucleic acid sequence. A promoter for use in the disclosure can be a constitutive, inducible or tissue specific, or a temporal promoter. Suitable promoters can be derived from viruses, prokaryotes and eukaryotes. Suitable promoters can be used to drive expression by any RNA polymerase. Examples of inducible promoters include, but are not limited to, T7 RNA polymerase promoter, T3 RNA polymerase promoter, isopropyl-beta-D-thiogalactopyranoside (IPTG)-regulated promoter, lactose induced promoter, heat shock promoter, tetracycline-regulated promoter, steroid-regulated promoter, metal-regulated promoter, estrogen receptor-regulated promoter, and the like. As used herein, “promoter” includes pol-III promoters such as H1 and U6 promoters. Inducible promoters can be regulated by various molecules such as doxycycline. In one embodiment, the promoter is a prokaryotic promoter selected from the group consisting of T7, T3, SP6 and derivatives thereof.

[0182] As used herein, a “ribozyme” (ribonucleic acid enzyme) is an RNA molecule capable of catalyzing biochemical reactions. A “self-cleaving ribozyme” is a ribozyme capable of cleaving itself. The ribozyme used in the disclosure can be any small endonucleolytic ribozyme that will self-cleave in the target cell type including, for example, hammerhead, hairpin, the hepatitis delta virus, the Varkud satellite, twister, twister sister, pistol and hatchet. See, e.g., Roth et al., Nat Chem Biol. 10(1):56-60; and Weinberg et al., Nat Chem Biol. 2015 August; 11(8):606-10, both incorporated herein by reference. U.S. 2015/0056174 provides modified hammerhead ribozymes with enhanced endonucleolytic activity. Ribozymes cleave the substrate RNA in a sequence specific manner at a substrate cleavage site. Typically, a ribozyme contains a catalytic region flanked by two binding regions. The ribozyme binding regions hybridize to the substrate RNA, while the catalytic region cleaves the substrate RNA at a substrate cleavage site to yield a cleaved RNA product. In various embodiment, the 5′ or 3′ of various constructs can be a twister ribozyme or a twister sister ribozyme. For example, the 5′ and 3′ ribozymes of various constructs are either a P3 or P1 twister ribozyme but not both P3 or both P1.

[0183] The term “subject” broadly refers to any animal, including but not limited to, human and non-human animals (e.g., dogs, cats, cows, horses, sheep, pigs, poultry, fish, crustaceans, etc.).

[0184] As used herein, the terms “transformation” and “transfection” are intended to refer to a variety of art-recognized techniques for introducing foreign nucleic acid into a host cell, including calcium phosphate or calcium chloride co-precipitation, DEAE-dextran-mediated transfection, lipofection (e.g., using commercially available reagents such as, for example, LIPOFECTIN® (Invitrogen Corp., San Diego, CA), LIPOFECTAMINE® (Invitrogen), FUGENE® (Roche Applied Science, Basel, Switzerland), JETPEI™ (Polyplus-transfection Inc., New York, NY), EFFECTENE® (Qiagen, Valencia, CA), DREAMFECT™ (OZ Biosciences, France) and the like), or electroporation. Suitable methods for transforming or transfecting host cells can be found in Sambrook, et al. (Molecular Cloning: A Laboratory Manual. 2nd, ed., Cold Spring harbor Laboratory, Cold Spring Harbor Laboratory Press, Cold Spring Harbor, N.Y., 1989), and other laboratory manuals. Standard recombinant DNA and molecular cloning techniques used herein are well known in the art and are described in Sambrook, J., Fritsch, E. F. and Maniatis, T., Molecular Cloning: A Laboratory Manual, 2^{nd}ed.; Cold Spring Harbor Laboratory: Cold Spring Harbor, N.Y., (1989) and by Silhavy, T. J., Bennan, M. L. and Enquist, L. W., Experiments with Gene Fusions; Cold Spring Harbor Laboratory: Cold Spring Harbor, N.Y., (1984); and by Ausubel, F. M. et. al., Current Protocols in Molecular Biology, Greene Publishing and Wiley-Interscience (1987) each of which are hereby incorporated by reference in its entirety. Additional useful methods are described in manuals including Advanced Bacterial Genetics (Davis, Roth and Botstein, Cold Spring Harbor Laboratory, 1980), Experiments with Gene Fusions (Silhavy, Berman and Enquist, Cold Spring Harbor Laboratory, 1984), Experiments in Molecular Genetics (Miller, Cold Spring Harbor Laboratory, 1972) Experimental Techniques in Bacterial Genetics (Maloy, in Jones and Bartlett, 1990), and A Short Course in Bacterial Genetics (Miller, Cold Spring Harbor Laboratory 1992) each of which are hereby incorporated by reference in its entirety.

[0185] As used herein, the term “vector” can refer to a nucleic acid construct or lipid or molecule designed for transfer between different hosts or medium, including but not limited to a plasmid, a virus, a cosmid, a phage, a bacterial artificial chromosome (BAC), a yeast artificial chromosome (YAC), etc. In some embodiments, a “viral vector” is defined as a recombinantly produced virus or viral particle that comprises a polynucleotide to be delivered into a host cell, either in vivo, ex vivo or in vitro. In some embodiments, plasmid vectors can be prepared from commercially available vectors. In other embodiments, viral vectors can be produced from baculoviruses, retroviruses, adenoviruses, AAVs. In one embodiment, the viral vector is a lentiviral vector. Examples of viral vectors include retroviral vectors, adenovirus vectors, adeno-associated virus vectors, alphavirus vectors and the like. Infectious tobacco mosaic virus (TMV)-based vectors can be used to manufacturer proteins and have been reported to express Griffithsin in tobacco leaves. Alphavirus vectors, such as Semliki Forest virus-based vectors and Sindbis virus-based vectors, have also been developed for use in gene therapy and immunotherapy. In aspects where gene transfer is mediated by a retroviral vector, a vector construct can refer to the polynucleotide comprising the retroviral genome or part thereof, and a gene of interest. Methods for the introduction of vectors or constructs into cells are known to those of skill in the art and include, but are not limited to, lipid-mediated transfer (i.e., liposomes, including neutral and cationic lipids), electroporation, nucleofection, direct injection, cell fusion, particle bombardment, calcium phosphate co-precipitation, DEAE-dextran-mediated transfer and/or viral vector-mediated transfer.

[0186] The terms “treat”, “treating” and “treatment”, as used herein, refers to ameliorating symptoms associated with a disease or disorder. Also, the terms “treat”, “treating” and “treatment” include preventing or delaying the onset of the disease or disorder symptoms, and/or lessening the severity or frequency of symptoms of the disease or disorder.

[0187] The disclosure demonstrates engineered in situ circularized RNAs (icRNAs). This approach enables icRNA delivery as linear RNA (linear icRNA), thus making them compatible with routine laboratory synthesis, purification, and delivery formulations. The disclosure demonstrates protein translation and persistence from circular icRNAs both in vitro and in vivo, and confirmed their versatility and activity in applications spanning from potential regenerative medicine applications to genome and epigenome targeting. Notably, the icRNA strategy provided for generation and delivery of large constructs, such as CRISPRoff, which would be more cumbersome to deploy via lentiviral and adeno-associated virus (AAVs) due to packaging limits.

[0188] The disclosure also provides a LORAX platform of protein engineering that can be applied iteratively to tackle particularly challenging multiplexed protein engineering tasks by exploring huge swaths of combinatorial mutation space unapproachable using previous techniques. The technique was used to create a Cas9 variant with seven simultaneously deimmunized epitopes which still retains robust functionality in a single round of screening. The platform provides for gene editing to long-persistence therapeutic modalities such as AAV or icRNA delivery. Furthermore, while this methodology is particularly suited to the unique challenges of protein deimmunization, it is also applicable to any potential protein engineering goal, so long as there exists an appropriate screening procedure to select for the desired functionality.

[0189] The versatility of the LORAX platform can be modified to includes protein structure, coevolutionary epistatic constraints, amino acid signaling motifs, or T-/B-cell receptor binding repertoires, among other possibilities. The disclosure provides a network-based method for differentiating spurious from bonafide hits leveraging known aspects of protein epistasis and fitness landscapes. Similar customizations and tweaks relevant to the specific biology of a given problem may yield substantial returns in applying LORAX or other large-scale combinatorial screening methods to various protein engineering challenges.

[0190] Using the LORAX platform Cas9 immunotolerant polypeptide were developed. The disclosure a Cas9 variant comprises a sequence that has at least 85% sequence identity (e.g., 85%, 87%, 90%, 92%, 95%, 98%, 99% or 100%) to SEQ ID NO:1439 and has a mutation selected from the group consisting of L513T, L622Q, and a combination of L513T and L622Q, wherein the polypeptide can perform editing activity (e.g., endonuclease activity) with CRISPR In a further embodiment, the polypeptide can have 5-6 additional mutations selected from the group consisting of (i) Y285Q, L726G, L815D, L1244G and L 1281A; and (b) Y285Q, S367C, L726G, L815D, L 1244G and L 1281A. In another embodiment, the Cas9 variant has a sequence of SEQ ID NO:1439 with 1-10 (e.g., 1, 2, 3, 4, 5, 6, 7, 8, 9, or 10) conservative amino acid substitutions and has an L513T, L622Q or an L513T and L622Q mutation, wherein the polypeptide can perform editing activity (e.g., endonuclease activity) with CRISPR In a further embodiment, the polypeptide can have 5-6 additional mutations selected from the group consisting of (i) Y285Q, L726G, L815D, L 1244G and L 1281A; and (b) Y285Q, S367C, L726G, L815D, L 1244G and L 1281A.

[0191] Disclosed herein are in situ gircularized RNAs (icRNAs) engineered utilizing autocatalytic RNA circularization (sometimes referred to as inducible ribozyme-mediated RNA-construct system). This approach enables icRNA delivery as a linear RNA polynucleotide (e.g., molecule) or a linear ribozyme-activated RNA construct. icRNAs are compatible with routine laboratory synthesis, purification, and delivery formulations. Uses of icRNAs in both in vitro and in vivo methods provided increased protein translation and persistence. In some embodiments, an icRNA comprises different combinations of regulatory domains (e.g., IRESs) and 3′ domains (e.g., 3′ UTRs) for increased protein translation. Their versatility and activity in applications spanning from gene therapy and RNA vaccines to genome and epigenome targeting are described herein.

[0192] A circular RNA polynucleotide (also referred to as a circular ribozyme-activated RNA construct) can be generated by the circularization of a linear RNA polynucleotide comprising ligation sequences that can be ligated together by an RtcB protein, thereby producing the circular RNA polynucleotide. The linear RNA polynucleotide (also referred to as a hybridization construct where the ligation sequences hybridize to each other; a linearized ribozyme activated RNA polynucleotide; linearized ribozyme activated RNA construct; a linear icRNA; or a linear version of the circular icRNA, which are used interchangeably) is a substrate for the RtcB enzyme.

[0193] In some embodiments, the linearized ribozyme activated RNA construct (linear icRNA) includes one or more components selected from the group consisting of: two ligation sequences, an IRES or self-cleaving peptide coding sequence, a WPRE or a 3′ UTR sequence with an optional poly(A) sequence, and a polynucleotide of interest. In some embodiments, the linearized ribozyme activated RNA construct includes one or more components selected from the group consisting of: two hybridized ligation sequences, an IRES, a WPRE, a 3′ UTR sequence, a poly(A), and a polynucleotide of interest (e.g., encoding a payload or transgene). In some embodiments, a spacer or linker sequence is present between any components of the linearized ribozyme activated RNA construct. In some embodiments, the polynucleotide of interest encodes a polypeptide of interest such as, but not limited to, a fill-length protein, a fusion protein, a chimeric protein, a recombinant protein, a therapeutic protein, a protein fragment, a truncated protein, and the like.

[0194] In various embodiments, the linearized ribozyme activated RNA construct comprises in 5′ to 3′ order: a ligation sequence (e.g., 5′ ligation sequence), a regulatory sequence (e.g., an IRES sequence and the like), a polynucleotide sequence of interest, a WPRE sequence, a poly(A) sequence, and a ligation sequence (e.g., 3′ ligation sequence). In some embodiments, the linearized ribozyme activated RNA construct includes in 5′ to 3′ order: a ligation sequence (e.g., 5′ ligation sequence), an IRES sequence, a polynucleotide sequence of interest, a WPRE sequence or a 3′ UTR sequence, and an optional poly(A) sequence, and a ligation sequence (e.g., 3′ ligation sequence). The complementary 5′ ligation sequence and 3′ ligation sequence can hybridize together and the linear RNA polynucleotide can form a stem structure (e.g., a ligation stem structure). See, FIGS. 1A, 7A, and 7G for an example of a linearized ribozyme activated RNA construct with a stem structure (in particular, the RNA polynucleotide shown immediately upstream of the action of delivery into cells).

[0195] In some embodiments, the ligation sequences are located at opposite ends of the linearized ribozyme activated RNA construct and one ligation sequence includes a 5′ hydroxyl end and the other ligation sequence includes a 2′,3′-cyclic phosphate end. In some embodiments, the ligation sequences are or include sections that are complementary to each other. In some embodiments, the ligation sequences are at least partially complementary to each other. In some embodiments, the ligation sequences or a portion thereof hybridize together in a cell or in standard in vitro conditions. In some embodiments, the ligation sequences are at least 85%, e.g., at least 85%, 86%, 87%, 88%, 89%, 90%, 91%, 92%, 93%, 94%, 95%, 96%, 97%, 98%, 99% or more complementary over the length of one of the sequences. In some embodiments, the ligation sequences are 100% complementary over the length of one of the sequences. In some instances, the 5′ ligation sequence is at least 85%, e.g., at least 85%, 86%, 87%, 88%, 89%, 90%, 91%, 92%, 93%, 94%, 95%, 96%, 97%, 98%, 99% or more complementary to the 3′ ligation sequence. In various instances, the 3′ ligation sequence is at least 85%, e.g., at least 85%, 86%, 87%, 88%, 89%, 90%, 91%, 92%, 93%, 94%, 95%, 96%, 97%, 98%, 99% or more complementary to the 5′ ligation sequence. In some embodiments, a linear RNA polynucleotide hybridizes to itself (e.g., self-hybridizes) at the 5′ and 3′ ligation sequences.

[0196] In some embodiments, the 5′ ligation sequence or the 3′ ligation sequence comprises the nucleic acid sequence of SEQ ID NO: 1413 (5′-AACCAUGCCGACUGAUGGCAG-3′). In some embodiments, the 5′ ligation sequence or the 3′ ligation sequence comprises a nucleic acid sequence having at least 90%, e.g., at least 90%, 91%, 92%, 93%, 94%, 95%, 96%, 97%, 98%, 99% or more sequence identity to SEQ ID NO: 1413. In some cases, the 5′ and 3′ ligation sequences both comprise the nucleic acid sequence of SEQ ID NO: 1413. In several embodiments, the 5′ ligation sequence or the 3′ ligation sequence comprises the nucleic acid sequence of SEQ ID NO: 1415 (5′-CUGCCAUCAGUCGGCGUGGACUGUAG-3′). In various embodiments, the 5′ ligation sequence or the 3′ ligation sequence comprises a nucleic acid sequence having at least 90%, e.g., at least 90%, 91%, 92%, 93%, 94%, 95%, 96%, 97%, 98%, 99% or more sequence identity to SEQ ID NO: 1415. In some instances, the 5′ and 3′ ligation sequences both include the nucleic acid sequence of SEQ ID NO: 1415. The 5′ and 3′ ligation sequences can comprise the same nucleic acid sequence. The 5′ and 3′ ligation sequences can have the same nucleic acid sequence. The 5′ and 3′ ligation sequences can have different nucleic acid sequences. The 5′ and 3′ ligation sequences can comprise different nucleic acid sequences. In some embodiments, the 5′ ligation sequence is SEQ ID NO: 1413 and the 3′ ligation sequence is SEQ ID NO: 1415.

[0197] In some embodiments, the IRES is selected from the group consisting of a cricket paralysis virus IRES, a Homo sapiens IGF2 IRES, a hepatovirus A IRES, a hepatitis C virus H77 isolate IRES, a Homo sapiens FGF1 IRES, a bovine viral diarrhea virus 1 IRES, a human rhinovirus A89 IRES, a pan paniscus LIMA1, a human adenovirus 2 IRES, a Montana myotis leukoencephalitis virus IRES, a Homo sapiens RANBP3 IRES, a pestivirus giraffe 1 IRES, a Homo sapiens TGIF1 IRES, a human poliovirus 1 mahoney IRES, a foot-and-mouth disease virus type O IRES, an encephalomyocarditis virus 7A IRES, an encephalomyocarditis virus 6A IRES, an enterovirus 71 IRES, a coxsackievirus B3 IRES, and an IRES sequence provided in the sequence listing including in SEQ ID NOS: 1-1348, and 1361-1391 and the figures such as FIGS. 17-19, where the T nucleotides can be U nucleotides in an RNA polynucleotide. In some embodiments, the IRES sequence is a nucleic acid sequence having at least 90% (e.g., at least 90%, 91%, 92%, 93%, 94%, 95%, 96%, 97%, 98%, 99% or more) sequence identity to any one of SEQ ID NOS: 1-1348, and 1361-1391 and any one shown in FIGS. 17-19, where the T nucleotides can be U nucleotides in an RNA polynucleotide.

[0198] In some embodiments, the WPRE sequence comprises the sequence of SEQ ID NO:1353, wherein the T nucleotides can also be U nucleotides in an RNA polynucleotide. In some embodiments, the WPRE comprises a nucleic acid sequence having at least 90% (e.g., at least 90%, 91%, 92%, 93%, 94%, 95%, 96%, 97%, 98%, 99% or more) sequence identity to of SEQ ID NO:1353, where the T nucleotides can be U nucleotides in an RNA polynucleotide.

[0199] In some embodiments, the 3′UTR sequence is selected from the group consisting of an mtRNR1-AES 3′ UTR, an mtRNR1-LSP1 3′ UTR, an AES-mtRNR1 3′ UTR, an AES-hBg 3′ UTR, an FCGRT-hBg 3′ UTR, a 2hBg 3′ UTR, and a HBA1 3′ UTR. A 3′ UTR can comprise a sequence selected from the group consisting of SEQ ID NOS: 1354-1360 and 1384-1390 and the figures such as FIG. 19, where the T nucleotides can be U nucleotides in a RNA polynucleotide. In some embodiments, the 3′UTR sequence is a nucleic acid sequence having at least 90% (e.g., at least 90%, 91%, 92%, 93%, 94%, 95%, 96%, 97%, 98%, 99% or more) sequence identity to any one of SEQ ID NOS: 1354-1360 and 1384-1390 and any one shown in FIG. 19, where the T nucleotides can be U nucleotides in a RNA polynucleotide.

[0200] In some embodiments, the poly(A) sequence is a stretch or chain of about 5-500, 10-500, 20-500, 50-500, 70-500, 80-500, 90-500, 100-500, 110-500, 120-500, 130-500, 140-500, 150-500, 160-500, 165-500, 170-500, 180-500, 190-500, 200-500, 10-200, 20-200, 30-200, 40-200, 50-200, 60-200, 70-200, 80-200, 90-200, 100-200, 50, 120, 150, 165, 200, 500, or more (or any value between a preceding range of values) adenine nucleotides. In some embodiments, the poly(A) sequence is a stretch or chain of 5-500, 10-500, 20-500, 50-500, 70-500, 80-500, 90-500, 100-500, 110-500, 120-500, 130-500, 140-500, 150-500, 160-500, 165-500, 170-500, 180-500, 190-500, 200-500, 10-200, 20-200, 30-200, 40-200, 50-200, 60-200, 70-200, 80-200, 90-200, 100-200, 50, 120, 150, 165, 200, 500, or more (or any value between a range of preceding values) adenine nucleotides.

[0201] In some embodiments, the linearized ribozyme activated RNA construct comprises an IRES sequence, a WPRE sequence, and a poly(A) sequence of any depicted in SEQ ID NOs: 1381-1391 and FIG. 19 (please note that the sequences in FIG. 19 include the eGFP coding sequence (bold) as the payload sequence or polypeptide of interest sequence). In some embodiments, the linearized ribozyme activated RNA construct comprises the IRES sequence, the WPRE sequence, a 3′ UTR sequence, and the poly(A) sequence of any depicted in SEQ ID NOs: 1384-1391 and FIG. 19, where the T nucleotides are U nucleotides in the RNA polynucleotide.

[0202] In some embodiments, the linearized ribozyme activated RNA construct comprises in 5′ to 3′ order: (i) a 5′ ligation sequence of SEQ ID NO: 1413, (ii) an IRES sequence of SEQ ID NO:1346 (encephalomycarditis virus 6A IRES), (iii) a polynucleotide sequence of interest, (iv) a WPRE sequence of SEQ ID NO: 1353, (v) a poly(A) sequence (e.g., 10-180 adenine nucleotides), and (vi) a 3′ ligation sequence of SEQ ID NO: 1415, where the T nucleotides are U nucleotides in the RNA polynucleotide.

[0203] In some embodiments, the linearized ribozyme activated RNA construct comprises in 5′ to 3′ order: (i) a 5′ ligation sequence of SEQ ID NO: 1413, (ii) an IRES sequence of SEQ ID NO:1346 (encephalomycarditis virus 6A IRES), (iii) a polynucleotide sequence of interest, (iv) a WPRE sequence of SEQ ID NO: 1353, (v) any 3′ UTR sequence provided herein, (vi) a poly(A) sequence (e.g., 10-180 adenine nucleotides), and (vii) a 3′ ligation sequence of SEQ ID NO: 1415, where the T nucleotides are U nucleotides in the RNA polynucleotide.

[0204] In some embodiments, the linearized ribozyme activated RNA construct comprises in 5′ to 3′ order: (i) a 5′ ligation sequence of SEQ ID NO: 1413, (ii) an IRES sequence of SEQ ID NO:1346 (encephalomycarditis virus 6A IRES), (iii) a polynucleotide sequence of interest, (iv) a WPRE sequence of SEQ ID NO: 1353, (v) mtRNR1-AES 3′ UTR of SEQ ID NO: 1354, (vi) a poly(A) sequence (e.g., 10-180 adenine nucleotides), and (vii) a 3′ ligation sequence of SEQ ID NO: 1415, where the T nucleotides are U nucleotides in the RNA polynucleotide.

[0205] In some embodiments, the linearized ribozyme activated RNA construct comprises in 5′ to 3′ order: (i) a 5′ ligation sequence of SEQ ID NO: 1413, (ii) an IRES sequence of SEQ ID NO:1346 (encephalomycarditis virus 6A IRES), (iii) a polynucleotide sequence of interest, (iv) a WPRE sequence of SEQ ID NO: 1353, (v) mtRNR1-LSP1 3′ UTR of SEQ ID NO: 1355, (vi) a poly(A) sequence (e.g., 10-180 adenine nucleotides), and (vii) a 3′ ligation sequence of SEQ ID NO: 1415, where the T nucleotides are U nucleotides in the RNA polynucleotide.

[0206] In particular embodiments, the linearized ribozyme activated RNA construct comprises in 5′ to 3′ order: (i) a 5′ ligation sequence of SEQ ID NO: 1413, (ii) an IRES sequence of SEQ ID NO:1346 (encephalomycarditis virus 6A IRES), (iii) a polynucleotide sequence of interest, (iv) a WPRE sequence of SEQ ID NO: 1353, (v) AES-mtRNR1 3′ UTR of SEQ ID NO: 1356, (vi) a poly(A) sequence (e.g., 10-180 adenine nucleotides), and (vii) a 3′ ligation sequence of SEQ ID NO: 1415, where the T nucleotides are U nucleotides in the RNA polynucleotide.

[0207] In particular embodiments, the linearized ribozyme activated RNA construct comprises in 5′ to 3′ order: (i) a 5′ ligation sequence of SEQ ID NO: 1413, (ii) an IRES sequence of SEQ ID NO:1346 (encephalomycarditis virus 6A IRES), (iii) a polynucleotide sequence of interest, (iv) a WPRE sequence of SEQ ID NO: 1353, (v) AES-hBg 3′ UTR of SEQ ID NO: 1357, (vi) a poly(A) sequence (e.g., 10-180 adenine nucleotides), and (vii) a 3′ ligation sequence of SEQ ID NO: 1415, where the T nucleotides are U nucleotides in the RNA polynucleotide.

[0208] In various embodiments, the linearized ribozyme activated RNA construct comprises in 5′ to 3′ order: (i) a 5′ ligation sequence of SEQ ID NO: 1413, (ii) an IRES sequence of SEQ ID NO:1346 (encephalomycarditis virus 6A IRES), (iii) a polynucleotide sequence of interest, (iv) a WPRE sequence of SEQ ID NO: 1353, (v) FCGRT-hBg 3′ UTR of SEQ ID NO: 1358, (vi) a poly(A) sequence (e.g., 10-180 adenine nucleotides), and (vii) a 3′ ligation sequence of SEQ ID NO: 1415, where the T nucleotides are U nucleotides in the RNA polynucleotide.

[0209] In many embodiments, the linearized ribozyme activated RNA construct comprises in 5′ to 3′ order: (i) a 5′ ligation sequence of SEQ ID NO: 1413, (ii) an IRES sequence of SEQ ID NO:1346 (encephalomycarditis virus 6A IRES), (iii) a polynucleotide sequence of interest, (iv) a WPRE sequence of SEQ ID NO: 1353, (v) 2hBG 3′ UTR of SEQ ID NO: 1359, (vi) a poly(A) sequence (e.g., 10-180 adenine nucleotides), and (vii) a 3′ ligation sequence of SEQ ID NO: 1415, where the T nucleotides are U nucleotides in the RNA polynucleotide.

[0210] In some embodiments, the linearized ribozyme activated RNA construct comprises in 5′ to 3′ order: (i) a 5′ ligation sequence of SEQ ID NO: 1413, (ii) an IRES sequence of SEQ ID NO:1346 (encephalomycarditis virus 6A IRES), (iii) a polynucleotide sequence of interest, (iv) a WPRE sequence of SEQ ID NO: 1353, (v) HBA1 3′ UTR of SEQ ID NO: 1360, (vi) a poly(A) sequence (e.g., 10-180 adenine nucleotides), and (vii) a 3′ ligation sequence of SEQ ID NO: 1415, where the T nucleotides are U nucleotides in the RNA polynucleotide.

[0211] In other embodiments, the linearized ribozyme activated RNA construct comprises in 5′ to 3′ order: (i) a 5′ ligation sequence of SEQ ID NO: 1413, (ii) an IRES sequence of SEQ ID NO: 1348 (a coxsackievirus B3 IRES), (iii) a polynucleotide sequence of interest, (iii) a WPRE sequence of SEQ ID NO: 1353, (iv) a poly(A) sequence (e.g., 10-180 adenine nucleotides), and (v) a 3′ ligation sequence of SEQ ID NO: 1415, where the T nucleotides are U nucleotides in the RNA polynucleotide.

[0212] In some embodiments, the linearized ribozyme activated RNA construct comprises in 5′ to 3′ order: (i) a 5′ ligation sequence of SEQ ID NO: 1413, (ii) an IRES sequence of SEQ ID NO: 1348 (a coxsackievirus B3 IRES), (iii) a polynucleotide sequence of interest, (iv) a WPRE sequence of SEQ ID NO: 1353, (v) any 3′ UTR sequence provided herein, (vi) a poly(A) sequence (e.g., 10-180 adenine nucleotides), and (vii) a 3′ ligation sequence of SEQ ID NO: 1415, where the T nucleotides are U nucleotides in the RNA polynucleotide.

[0213] In some embodiments, the linearized ribozyme activated RNA construct comprises in 5′ to 3′ order: (i) a 5′ ligation sequence of SEQ ID NO: 1413, (ii) an IRES sequence of SEQ ID NO: 1348 (a coxsackievirus B3 IRES), (iii) a polynucleotide sequence of interest, (iv) a WPRE sequence of SEQ ID NO: 1353, (v) mtRNR1-AES 3′ UTR of SEQ ID NO: 1354, (vi) a poly(A) sequence (e.g., 10-180 adenine nucleotides), and (vii) a 3′ ligation sequence of SEQ ID NO: 1415, where the T nucleotides are U nucleotides in the RNA polynucleotide.

[0214] In some embodiments, the linearized ribozyme activated RNA construct comprises in 5′ to 3′ order: (i) a 5′ ligation sequence of SEQ ID NO: 1413, (ii) an IRES sequence of SEQ ID NO: 1348 (a coxsackievirus B3 IRES), (iii) a polynucleotide sequence of interest, (iv) a WPRE sequence of SEQ ID NO: 1353, (v) mtRNR1-LSP1 3′ UTR of SEQ ID NO: 1355, (vi) a poly(A) sequence (e.g., 10-180 adenine nucleotides), and (vii) a 3′ ligation sequence of SEQ ID NO: 1415, where the T nucleotides are U nucleotides in the RNA polynucleotide.

[0215] In particular embodiments, the linearized ribozyme activated RNA construct comprises in 5′ to 3′ order: (i) a 5′ ligation sequence of SEQ ID NO: 1413, (ii) an IRES sequence of SEQ ID NO: 1348 (a coxsackievirus B3 IRES), (iii) a polynucleotide sequence of interest, (iv) a WPRE sequence of SEQ ID NO: 1353, (v) AES-mtRNR1 3′ UTR of SEQ ID NO: 1356, (vi) a poly(A) sequence (e.g., 10-180 adenine nucleotides), and (vii) a 3′ ligation sequence of SEQ ID NO: 1415, where the T nucleotides are U nucleotides in the RNA polynucleotide.

[0216] In particular embodiments, the linearized ribozyme activated RNA construct comprises in 5′ to 3′ order: (i) a 5′ ligation sequence of SEQ ID NO: 1413, (ii) an IRES sequence of SEQ ID NO: 1348 (a coxsackievirus B3 IRES), (iii) a polynucleotide sequence of interest, (iv) a WPRE sequence of SEQ ID NO: 1353, (v) AES-hBg 3′ UTR of SEQ ID NO: 1357, (vi) a poly(A) sequence (e.g., 10-180 adenine nucleotides), and (vii) a 3′ ligation sequence of SEQ ID NO: 1415, where the T nucleotides are U nucleotides in the RNA polynucleotide.

[0217] In various embodiments, the linearized ribozyme activated RNA construct comprises in 5′ to 3′ order: (i) a 5′ ligation sequence of SEQ ID NO: 1413, (ii) an IRES sequence of SEQ ID NO: 1348 (a coxsackievirus B3 IRES), (iii) a polynucleotide sequence of interest, (iv) a WPRE sequence of SEQ ID NO: 1353, (v) FCGRT-hBg 3′ UTR of SEQ ID NO: 1358, (vi) a poly(A) sequence (e.g., 10-180 adenine nucleotides), and (vii) a 3′ ligation sequence of SEQ ID NO: 1415, where the T nucleotides are U nucleotides in the RNA polynucleotide.

[0218] In many embodiments, the linearized ribozyme activated RNA construct comprises in 5′ to 3′ order: (i) a 5′ ligation sequence of SEQ ID NO: 1413, (ii) an IRES sequence of SEQ ID NO: 1348 (a coxsackievirus B3 IRES), (iii) a polynucleotide sequence of interest, (iv) a WPRE sequence of SEQ ID NO: 1353, (v) 2hBG 3′ UTR of SEQ ID NO: 1359, (vi) a poly(A) sequence (e.g., 10-180 adenine nucleotides), and (vii) a 3′ ligation sequence of SEQ ID NO: 1415, where the T nucleotides are U nucleotides in the RNA polynucleotide.

[0219] In some embodiments, the linearized ribozyme activated RNA construct comprises in 5′ to 3′ order: (i) a 5′ ligation sequence of SEQ ID NO: 1413, (ii) an IRES sequence of SEQ ID NO: 1348 (a coxsackievirus B3 IRES), (iii) a polynucleotide sequence of interest, (iv) a WPRE sequence of SEQ ID NO: 1353, (v) HBA1 3′ UTR of SEQ ID NO: 1360, (vi) a poly(A) sequence (e.g., 10-180 adenine nucleotides), and (vii) a 3′ ligation sequence of SEQ ID NO: 1415, where the T nucleotides are U nucleotides in the RNA polynucleotide.

[0220] The linearized ribozyme activated RNA construct can form a circular RNA polynucleotide. In other words, a linear icRNA can circularize to form a circular icRNA. In some embodiments, the circular RNA polynucleotide is formed in the presence of a linearized ribozyme activated RNA construct such as a linear ribozyme activated RNA construct that lacks ribozymes, such as twister ribozymes. In some embodiments, the circular RNA polynucleotide is formed in a cell and in the presence of a linear RNA polynucleotide such as a linear ribozyme activated RNA construct that lacks ribozymes, such as twister ribozymes. In some embodiments, the circular RNA polynucleotide is formed in the absence of a corresponding DNA construct encoding the linearized ribozyme activated RNA construct. In some embodiments, the circular RNA polynucleotide is formed in the absence of a corresponding DNA construct encoding the linearized ribozyme activated RNA construct in a cell. In some embodiments, the circular RNA polynucleotide is formed in cell lacking a corresponding DNA construct encoding the linearized ribozyme activated RNA construct. In some embodiments, the circular RNA polynucleotide is formed in the absence of a linear ribozyme-RNA polynucleotide such as a corresponding RNA construct that further comprises one or more ribozymes (e.g., twister ribozymes) encoding the linearized ribozyme activated RNA construct. In some embodiments, the circular RNA polynucleotide is formed in the absence of a linear ribozyme-RNA polynucleotide such as a corresponding RNA construct that further comprises one or more ribozymes (e.g., twister ribozymes) encoding the linearized ribozyme activated RNA construct in a cell. In some embodiments, the circular RNA polynucleotide is formed in cell lacking a linear ribozyme-RNA polynucleotide such as a corresponding RNA construct that further comprises one or more ribozymes (e.g., twister ribozymes) encoding the linearized ribozyme activated RNA construct. A linear ribozyme-RNA construct can be formed from transcription of a corresponding DNA construct encoding the linear ribozyme-RNA construct. In some embodiments, the circular RNA polynucleotide is formed in the presence of an RtcB protein. In some embodiments, the linearized ribozyme activated RNA construct is contacted or incubated with an RtcB protein in vitro or in vivo. In some embodiments, the linearized ribozyme activated RNA construct is contacted or incubated with an RtcB protein in a cell. In some embodiments, the linearized ribozyme activated RNA construct is circularized in a cell such as a cell expressing an RtcB protein. The RtcB protein in the cell can be an endogenous RtcB protein to that cell. The RtcB protein in the cell can be an exogenous RtcB protein that is delivered to that cell or expressed from a nucleic acid construct delivered to that cell. In many embodiments, the linearized ribozyme activated RNA construct is introduced (e.g., delivered or transfected) into a cell or an organism (e.g., a subject including a human subject) by any standard method known to one skilled in the art. In some embodiments, the linearized ribozyme activated RNA construct is delivered to a cell or organism using a lipid nanoparticle, a liposome, a charged polymer, an uncharged polymer, a nanoparticle, a polymer nanoparticle, a surfactant, a penetrating enhancer (including penetrating peptides), a gene transfer agent, a phospholipid, a micelle, a synthetic vector, a macromolecule, a dendrimer, a biopolymer, a viral particle, or any combination thereof. In some instances, the linearized ribozyme activated RNA construct is formulated with a lipid nanoparticle for delivery into a cell or organism. The linearized ribozyme activated RNA construct can be encapsulated within or associated with a lipid nanoparticle. In some embodiment, the RNA polynucleotide-lipid nanoparticle complex is administered to a cell, organism, or human subject according to standard methods known to those skilled in the art.

[0221] Detailed descriptions of lipid nanoparticles for RNA delivery can be found in, for example, Hou et al., Nat Rev Mater, 6, 1078-1094 (10 Aug. 2021). In some embodiments, a lipid nanoparticle comprises one or more components selected from the group consisting of: a cationic lipid, a neutral lipid, a steroid, a polymer conjugated lipid, a polymer, and a biodegradable agent. In some embodiments, the lipid nanoparticle comprises (6Z,9Z,28Z,31Z)-heptatriaconta-6,9,28,31-tetraen-19-yl-4-(dimethylamino) butanoate (DLin-MC3-DMA); cholesterol; 1,2-distearoyl-sn-glycero-3-phosphocholine (DSPC); and 1,2-dimyristoyl-rac-glycero-3-methoxypolyethylene glycol-2000 (DMG-PEG-2000). In some embodiments, the lipid nanoparticle has a mole ratio of DLin-MC3-DMA: cholesterol: DSPC: DMG-PEG-2000 is 50:38.5:10:1.5. In some instances, the mole ratio is different and optimized for the target cell or organism. In certain embodiments, the lipid nanoparticle has an N/P ratio ranging from 1-10. In some embodiments, the lipid nanoparticle has an N/P ratio of 5.4. In some instances, the N/P ratio is different and optimized for the target cell or organism.

[0222] A linearized ribozyme activated RNA construct described herein comprising a ligation sequence comprising a 5′-OH end and a ligation sequence comprises a 2′, 3′-cyclic phosphate end can be circularized in situ such as in a cell to generate a circular RNA polynucleotide (also referred to herein as circular icRNAs). As such, the resulting in situ circularized RNA (circular icRNA) includes the components of the linearized ribozyme activated RNA construct. In some embodiments, the circular RNA polynucleotide comprises one or more components including an IRES, WPRE, 3′ UTR, poly(A) stretch, or any combination thereof. These one or more components including an IRES, WPRE, 3′ UTR, poly(A) stretch, or any combination thereof of can increase protein translation, protein translation efficiency, and/or protein yield of any polypeptide of interest encoded in the circular RNA polynucleotide as compared to a circular RNA polynucleotide lacking such component(s). In some instances, cells comprising a circular RNA polynucleotide described herein produce a higher level of a polypeptide of interest encoded on the circular RNA as compared to a circular RNA that does not include an IRES, a WPRE, a 3′ UTR, a poly(A) stretch, or a combination thereof.

[0223] In some embodiments, the circular RNA polynucleotide comprises one or more components selected from the group consisting of: an IRES, a WPRE, a 3′ UTR sequence, a poly(A), and a polynucleotide of interest. In some embodiments, a spacer or linker sequence is present between any components of the circular RNA polynucleotide. In some embodiments, the polynucleotide of interest encodes a polypeptide of interest such as, but not limited to, a fill-length protein, a fusion protein, a chimeric protein, a recombinant protein, a therapeutic protein, a protein fragment, a truncated protein, and the like. In some embodiments, the circular RNA polynucleotide comprises in 5′ to 3′ order: a ligated sequence, an IRES sequence, a polynucleotide sequence of interest, a WPRE sequence, and a poly(A) sequence, where the ligated sequence is formed from the ligation of the 5′ and 3′ ligation sequences of the linear RNA polynucleotide. See, FIG. 7G of a linear RNA polynucleotide and its ligation sequences and a Sanger sequencing trace corresponding to a resulting circular RNA with the ligation junction. In some embodiments, the circular RNA polynucleotide comprises in 5′ to 3′ order: a ligated sequence, an IRES sequence, a polynucleotide sequence of interest, a WPRE sequence, a 3′ UTR sequence, a poly(A) sequence, where the ligated sequence is formed from the ligation of the 5′ and 3′ ligation sequences of the linear RNA polynucleotide. In some embodiments, the circular RNA polynucleotide comprises in 5′ to 3′ order: an IRES sequence, a polynucleotide sequence of interest, a WPRE sequence, an optional 3′ UTR sequence, and a poly(A) sequence.

[0224] In some embodiments, the IRES of the circular RNA polynucleotide is any selected from the group consisting of a cricket paralysis virus IRES, a Homo sapiens IGF2 IRES, a hepatovirus A IRES, a hepatitis C virus H77 isolate IRES, a Homo sapiens FGF1 IRES, a bovine viral diarrhea virus 1 IRES, a human rhinovirus A89 IRES, a pan paniscus LIMA1, a human adenovirus 2 IRES, a Montana myotis leukoencephalitis virus IRES, a Homo sapiens RANBP3 IRES, a pestivirus giraffe 1 IRES, a Homo sapiens TGIF1 IRES, a human poliovirus 1 mahoney IRES, a foot-and-mouth disease virus type O IRES, an encephalomyocarditis virus 7A IRES, an encephalomyocarditis virus 6A IRES, an enterovirus 71 IRES, a coxsackievirus B3 IRES, and an IRES sequence provided in the sequence listing including in SEQ ID NOS: 1-1348, and 1361-1391 and the figures such as FIGS. 17-19, where the T nucleotides are U nucleotides in a RNA polynucleotide. In some embodiments, the IRES sequence is a nucleic acid sequence having at least 90%, e.g., at least 90%, 91%, 92%, 93%, 94%, 95%, 96%, 97%, 98%, 99% or more, sequence identity to any one of SEQ ID NOS: 1-1348, and 1361-1391 and any one shown in FIGS. 17-19, where the T nucleotides are U nucleotides in a RNA polynucleotide. In some embodiments, the WPRE sequence of the circular RNA polynucleotide is the nucleic acid sequence of SEQ ID NO:1353, wherein the T nucleotides are U nucleotides in an RNA polynucleotide. In some embodiments, the WPRE sequence is a nucleic acid sequence having at least 90%, e.g., at least 90%, 91%, 92%, 93%, 94%, 95%, 96%, 97%, 98%, 99% or more sequence identity to of SEQ ID NO:1353, where the T nucleotides are U nucleotides in an RNA polynucleotide. In some embodiments, the 3′UTR sequence of the circular RNA polynucleotide is any selected from the group consisting of an mtRNR1-AES 3′ UTR, an mtRNR1-LSP1 3′ UTR, an AES-mtRNR1 3′ UTR, an AES-hBg 3′ UTR, an FCGRT-hBg 3′ UTR, a 2hBg 3′ UTR, and a HBA1 3′ UTR, a 3′UTR sequence provided in the sequence listing including in SEQ ID NOS: 1354-1360 and 1384-1390 and the figures such as FIG. 19, where the T nucleotides are U nucleotides in a RNA polynucleotide. In some embodiments, the 3′UTR sequence is a nucleic acid sequence having at least 90%, e.g., at least 90%, 91%, 92%, 93%, 94%, 95%, 96%, 97%, 98%, 99% or more, sequence identity to any one of SEQ ID NOS: 1354-1360 and 1384-1390 and any one shown in FIG. 19, where the T nucleotides are U nucleotides in a RNA polynucleotide. In some embodiments, the poly(A) sequence of the circular RNA polynucleotide is a stretch or chain of about 5-500, 10-500, 20-500, 50-500, 70-500, 80-500, 90-500, 100-500, 110-500, 120-500, 130-500, 140-500, 150-500, 160-500, 165-500, 170-500, 180-500, 190-500, 200-500, 10-200, 20-200, 30-200, 40-200, 50-200, 60-200, 70-200, 80-200, 90-200, 100-200, 50, 120, 150, 165, 200, 500, or more adenine nucleotides.

[0225] In some embodiments, the circular RNA polynucleotide comprises the IRES sequence, the WPRE sequence, and the poly(A) sequence of any depicted in SEQ ID NOs: 1381-1391 and FIG. 19. In some embodiments, the circular RNA polynucleotide comprises the IRES sequence, the WPRE sequence, a 3′ UTR sequence, and the poly(A) sequence of any depicted in SEQ ID NOs: 1384-1391 and FIG. 19, where the T nucleotides are U nucleotides in the RNA polynucleotide. In some embodiments, the circular RNA polynucleotide comprises in 5′ to 3′ order: (i) a 5′ ligation sequence of SEQ ID NO: 1413, (ii) an IRES sequence of SEQ ID NO:1346 (encephalomycarditis virus 6A IRES), (iii) a polynucleotide sequence of interest, (iv) a WPRE sequence of SEQ ID NO: 1353, (v) a poly(A) sequence (e.g., 10-180 adenine nucleotides), and (vi) a 3′ ligation sequence of SEQ ID NO: 1415, where the ligation sequences are ligated together and the T nucleotides are U nucleotides in the circular RNA polynucleotide.

[0226] In some embodiments, the circular RNA polynucleotide comprises in 5′ to 3′ order: (i) a 5′ ligation sequence of SEQ ID NO: 1413, (ii) an IRES sequence of SEQ ID NO:1346 (encephalomycarditis virus 6A IRES), (iii) a polynucleotide sequence of interest, (iv) a WPRE sequence of SEQ ID NO: 1353, (v) any 3′ UTR sequence provided herein, (vi) a poly(A) sequence (e.g., 10-180 adenine nucleotides), and (vii) a 3′ ligation sequence of SEQ ID NO: 1415, where the ligation sequences are ligated together and the T nucleotides are U nucleotides in the circular RNA polynucleotide. In some embodiments, the circular RNA polynucleotide comprises in 5′ to 3′ order: (i) a 5′ ligation sequence of SEQ ID NO: 1413, (ii) an IRES sequence of SEQ ID NO:1346 (encephalomycarditis virus 6A IRES), (iii) a polynucleotide sequence of interest, (iv) a WPRE sequence of SEQ ID NO: 1353, (v) mtRNR1-AES 3′ UTR of SEQ ID NO: 1354, (vi) a poly(A) sequence (e.g., 10-180 adenine nucleotides), and (vii) a 3′ ligation sequence of SEQ ID NO: 1415, where the ligation sequences are ligated together and the T nucleotides are U nucleotides in the circular RNA polynucleotide. In some embodiments, the circular RNA polynucleotide comprises in 5′ to 3′ order: (i) a 5′ ligation sequence of SEQ ID NO: 1413, (ii) an IRES sequence of SEQ ID NO:1346 (encephalomycarditis virus 6A IRES), (iii) a polynucleotide sequence of interest, (iv) a WPRE sequence of SEQ ID NO: 1353, (v) mtRNR1-LSP1 3′ UTR of SEQ ID NO: 1355, (vi) a poly(A) sequence (e.g., 10-180 adenine nucleotides), and (vii) a 3′ ligation sequence of SEQ ID NO: 1415, where the ligation sequences are ligated together and the T nucleotides are U nucleotides in the circular RNA polynucleotide. In particular embodiments, the circular RNA polynucleotide comprises in 5′ to 3′ order: (i) a 5′ ligation sequence of SEQ ID NO: 1413, (ii) an IRES sequence of SEQ ID NO:1346 (encephalomycarditis virus 6A IRES), (iii) a polynucleotide sequence of interest, (iv) a WPRE sequence of SEQ ID NO: 1353, (v) AES-mtRNR1 3′ UTR of SEQ ID NO: 1356, (vi) a poly(A) sequence (e.g., 10-180 adenine nucleotides), and (vii) a 3′ ligation sequence of SEQ ID NO: 1415, where the ligation sequences are ligated together and the T nucleotides are U nucleotides in the circular RNA polynucleotide. In particular embodiments, the circular RNA polynucleotide comprises in 5′ to 3′ order: (i) a 5′ ligation sequence of SEQ ID NO: 1413, (ii) an IRES sequence of SEQ ID NO:1346 (encephalomycarditis virus 6A IRES), (iii) a polynucleotide sequence of interest, (iv) a WPRE sequence of SEQ ID NO: 1353, (v) AES-hBg 3′ UTR of SEQ ID NO: 1357, (vi) a poly(A) sequence (e.g., 10-180 adenine nucleotides), and (vii) a 3′ ligation sequence of SEQ ID NO: 1415, where the ligation sequences are ligated together and the T nucleotides are U nucleotides in the circular RNA polynucleotide. In various embodiments, the circular RNA polynucleotide comprises in 5′ to 3′ order: (i) a 5′ ligation sequence of SEQ ID NO: 1413, (ii) an IRES sequence of SEQ ID NO:1346 (encephalomycarditis virus 6A IRES), (iii) a polynucleotide sequence of interest, (iv) a WPRE sequence of SEQ ID NO: 1353, (v) FCGRT-hBg 3′ UTR of SEQ ID NO: 1358, (vi) a poly(A) sequence (e.g., 10-180 adenine nucleotides), and (vii) a 3′ ligation sequence of SEQ ID NO: 1415, where the ligation sequences are ligated together and the T nucleotides are U nucleotides in the circular RNA polynucleotide. In many embodiments, the circular RNA polynucleotide comprises in 5′ to 3′ order: (i) a 5′ ligation sequence of SEQ ID NO: 1413, (ii) an IRES sequence of SEQ ID NO:1346 (encephalomycarditis virus 6A IRES), (iii) a polynucleotide sequence of interest, (iv) a WPRE sequence of SEQ ID NO: 1353, (v) 2hBG 3′ UTR of SEQ ID NO: 1359, (vi) a poly(A) sequence (e.g., 10-180 adenine nucleotides), and (vii) a 3′ ligation sequence of SEQ ID NO: 1415, where the ligation sequences are ligated together and the T nucleotides are U nucleotides in the circular RNA polynucleotide. In some embodiments, the circular RNA polynucleotide includes in 5′ to 3′ order: (i) a 5′ ligation sequence of SEQ ID NO: 1413, (ii) an IRES sequence of SEQ ID NO:1346 (encephalomycarditis virus 6A IRES), (iii) a polynucleotide sequence of interest, (iv) a WPRE sequence of SEQ ID NO: 1353, (v) HBA1 3′ UTR of SEQ ID NO: 1360, (vi) a poly(A) sequence (e.g., 10-180 adenine nucleotides), and (vii) a 3′ ligation sequence of SEQ ID NO: 1415, where the ligation sequences are ligated together and the T nucleotides are U nucleotides in the circular RNA polynucleotide.

[0227] In other embodiments, the circular RNA polynucleotide comprises in 5′ to 3′ order: (i) a 5′ ligation sequence of SEQ ID NO: 1413, (ii) an IRES sequence of SEQ ID NO: 1348 (a coxsackievirus B3 IRES), (iii) a polynucleotide sequence of interest, (iii) a WPRE sequence of SEQ ID NO: 1353, (iv) a poly(A) sequence (e.g., 10-180 adenine nucleotides), and (v) a 3′ ligation sequence of SEQ ID NO: 1415, where the ligation sequences are ligated together and the T nucleotides are U nucleotides in the circular RNA polynucleotide. In some embodiments, the circular RNA polynucleotide comprises in 5′ to 3′ order: (i) a 5′ ligation sequence of SEQ ID NO: 1413, (ii) an IRES sequence of SEQ ID NO: 1348 (a coxsackievirus B3 IRES), (iii) a polynucleotide sequence of interest, (iv) a WPRE sequence of SEQ ID NO: 1353, (v) any 3′ UTR sequence provided herein, (vi) a poly(A) sequence (e.g., 10-180 adenine nucleotides), and (vii) a 3′ ligation sequence of SEQ ID NO: 1415, where the ligation sequences are ligated together and the T nucleotides are U nucleotides in the circular RNA polynucleotide. In some embodiments, the circular RNA polynucleotide comprises in 5′ to 3′ order: (i) a 5′ ligation sequence of SEQ ID NO: 1413, (ii) an IRES sequence of SEQ ID NO: 1348 (a coxsackievirus B3 IRES), (iii) a polynucleotide sequence of interest, (iv) a WPRE sequence of SEQ ID NO: 1353, (v) mtRNR1-AES 3′ UTR of SEQ ID NO: 1354, (vi) a poly(A) sequence (e.g., 10-180 adenine nucleotides), and (vii) a 3′ ligation sequence of SEQ ID NO: 1415, where the ligation sequences are ligated together and the T nucleotides are U nucleotides in the circular RNA polynucleotide. In some embodiments, the circular RNA polynucleotide comprises in 5′ to 3′ order: (i) a 5′ ligation sequence of SEQ ID NO: 1413, (ii) an IRES sequence of SEQ ID NO: 1348 (a coxsackievirus B3 IRES), (iii) a polynucleotide sequence of interest, (iv) a WPRE sequence of SEQ ID NO: 1353, (v) mtRNR1-LSP1 3′ UTR of SEQ ID NO: 1355, (vi) a poly(A) sequence (e.g., 10-180 adenine nucleotides), and (vii) a 3′ ligation sequence of SEQ ID NO: 1415, where the ligation sequences are ligated together and the T nucleotides are U nucleotides in the circular RNA polynucleotide. In particular embodiments, the circular RNA polynucleotide comprises in 5′ to 3′ order: (i) a 5′ ligation sequence of SEQ ID NO: 1413, (ii) an IRES sequence of SEQ ID NO: 1348 (a coxsackievirus B3 IRES), (iii) a polynucleotide sequence of interest, (iv) a WPRE sequence of SEQ ID NO: 1353, (v) AES-mtRNR1 3′ UTR of SEQ ID NO: 1356, (vi) a poly(A) sequence (e.g., 10-180 adenine nucleotides), and (vii) a 3′ ligation sequence of SEQ ID NO: 1415, where the ligation sequences are ligated together and the T nucleotides are U nucleotides in the circular RNA polynucleotide. In particular embodiments, the circular RNA polynucleotide comprises in 5′ to 3′ order: (i) a 5′ ligation sequence of SEQ ID NO: 1413, (ii) an IRES sequence of SEQ ID NO: 1348 (a coxsackievirus B3 IRES), (iii) a polynucleotide sequence of interest, (iv) a WPRE sequence of SEQ ID NO: 1353, (v) AES-hBg 3′ UTR of SEQ ID NO: 1357, (vi) a poly(A) sequence (e.g., 10-180 adenine nucleotides), and (vii) a 3′ ligation sequence of SEQ ID NO: 1415, where the ligation sequences are ligated together and the T nucleotides are U nucleotides in the circular RNA polynucleotide. In various embodiments, the circular RNA polynucleotide comprises in 5′ to 3′ order: (i) a 5′ ligation sequence of SEQ ID NO: 1413, (ii) an IRES sequence of SEQ ID NO: 1348 (a coxsackievirus B3 IRES), (iii) a polynucleotide sequence of interest, (iv) a WPRE sequence of SEQ ID NO: 1353, (v) FCGRT-hBg 3′ UTR of SEQ ID NO: 1358, (vi) a poly(A) sequence (e.g., 10-180 adenine nucleotides), and (vii) a 3′ ligation sequence of SEQ ID NO: 1415, where the ligation sequences are ligated together and the T nucleotides are U nucleotides in the circular RNA polynucleotide. In many embodiments, the circular RNA polynucleotide comprises in 5′ to 3′ order: (i) a 5′ ligation sequence of SEQ ID NO: 1413, (ii) an IRES sequence of SEQ ID NO: 1348 (a coxsackievirus B3 IRES), (iii) a polynucleotide sequence of interest, (iv) a WPRE sequence of SEQ ID NO: 1353, (v) 2hBG 3′ UTR of SEQ ID NO: 1359, (vi) a poly(A) sequence (e.g., 10-180 adenine nucleotides), and (vii) a 3′ ligation sequence of SEQ ID NO: 1415, where the ligation sequences are ligated together and the T nucleotides are U nucleotides in the circular RNA polynucleotide. In some embodiments, the circular RNA polynucleotide comprises in 5′ to 3′ order: (i) a 5′ ligation sequence of SEQ ID NO: 1413, (ii) an IRES sequence of SEQ ID NO: 1348 (a coxsackievirus B3 IRES), (iii) a polynucleotide sequence of interest, (iv) a WPRE sequence of SEQ ID NO: 1353, (v) HBA1 3′ UTR of SEQ ID NO: 1360, (vi) a poly(A) sequence (e.g., 10-180 adenine nucleotides), and (vii) a 3′ ligation sequence of SEQ ID NO: 1415, where the ligation sequences are ligated together and the T nucleotides are U nucleotides in the circular RNA polynucleotide.

[0228] As described above, a linearized ribozyme activated RNA construct that is a precursor form of a circular RNA polynucleotide includes two ligation sequences located at opposite ends of the linearized ribozyme activated RNA construct, where one ligation sequence includes a 5′ hydroxyl end and the other ligation sequence includes a 2′,3′-cyclic phosphate end. In some embodiments, the ligation sequences are complementary. In some embodiments, the ligation sequences are partially complementary. In some embodiments, the ligation sequences or a portion thereof hybridize together in a cell and/or in standard in vitro conditions. In some embodiments, the ligation sequences are at least 85%, e.g., at least 85%, 86%, 87%, 88%, 89%, 90%, 91%, 92%, 93%, 94%, 95%, 96%, 97%, 98%, 99% or more complementary over the length of one of the sequences. In some embodiments, the ligation sequences are 100% complementary over the length of at least one of the sequences. In some instances, the 5′ ligation sequence is at least 85%, e.g., at least 85%, 86%, 87%, 88%, 89%, 90%, 91%, 92%, 93%, 94%, 95%, 96%, 97%, 98%, 99% or more complementary to the 3′ ligation sequence. In various instances, the 3′ ligation sequence is at least 85%, e.g., at least 85%, 86%, 87%, 88%, 89%, 90%, 91%, 92%, 93%, 94%, 95%, 96%, 97%, 98%, 99% or more complementary to the 5′ ligation sequence. In some embodiments, the linearized ribozyme activated RNA construct is found in a structure where the 5′ ligation sequence and the 3′ ligation sequence hybridize (see, for example, the linearized ribozyme activated RNA construct without ribozymes in FIGS. 1A, 7A, and 7G). In some embodiments, the 5′ ligation sequence or the 3′ ligation sequence includes the nucleic acid sequence of SEQ ID NO: 1413. In some embodiments, the 5′ ligation sequence or the 3′ ligation sequence includes a nucleic acid sequence having at least 90%, e.g., at least 90%, 91%, 92%, 93%, 94%, 95%, 96%, 97%, 98%, 99% or more sequence identity to SEQ ID NO: 1413. In some cases, the 5′ and 3′ ligation sequences both comprise the nucleic acid sequence of SEQ ID NO: 1413. In several embodiments, the 5′ ligation sequence or the 3′ ligation sequence includes the nucleic acid sequence of SEQ ID NO: 1415. In various embodiments, the 5′ ligation sequence or the 3′ ligation sequence comprises a nucleic acid sequence having at least 90%, e.g., at least 90%, 91%, 92%, 93%, 94%, 95%, 96%, 97%, 98%, 99% or more sequence identity to SEQ ID NO: 1415. In some instances, the 5′ and 3′ ligation sequences both comprise the nucleic acid sequence of SEQ ID NO: 1415. The 5′ and 3′ ligation sequences can comprise the same nucleic acid sequence. The 5′ and 3′ ligation sequences can have the same nucleic acid sequence. The 5′ and 3′ ligation sequences can comprise different nucleic acid sequences. The 5′ and 3′ ligation sequences can have different nucleic acid sequences. In some embodiments, the 5′ ligation sequence is SEQ ID NO: 1413 and the 3′ ligation sequence is SEQ ID NO: 1415. In some instances, a portion of the 5′ ligation sequence is complementary to a portion the 3′ ligation sequence of a linear RNA polynucleotide. See, for example, FIGS. 7F and 7G.

[0229] icRNAs including icRNAs in a linear or circular RNA format can be produced from a DNA construct encoding the icRNAs. In some embodiments, the DNA construct (such as a linear or circular DNA construct) comprises a nucleic acid sequence encoding any of the linear RNA polynucleotides described herein. In some embodiments, the DNA construct (such as a linear or circular DNA construct) comprises a nucleic acid sequence encoding any of the circular RNA polynucleotides described herein. In some embodiments, the DNA construct (such as a linear or circular DNA construct) comprises a nucleic acid sequence encoding any of the linear RNA polynucleotides described herein, include a linear RNA polynucleotide comprising a ribozyme (also referred to as a linearized ribozyme-RNA construct) or a linear RNA polynucleotide lacking a ribozyme (also referred to as linearized ribozyme activated RNA construct or linear icRNA).

[0230] In some embodiments, a DNA construct comprises in 5′ to 3′ order: a promoter (e.g., a T7 promoter), a 5′ ribozyme sequence, a 5′ ligation sequence, an IRES, a polynucleotide sequence of interest, a WPRE, a poly(A), a 3′ ligation sequence, and a 3′ ribozyme sequence. In some embodiments, a spacer or linker sequence is present between any components of the DNA construct.

[0231] In various embodiments, the DNA construct comprises in 5′ to 3′ order: a ribozyme (e.g., 5′ ribozyme), a ligation sequence (e.g., 5′ ligation sequence), an IRES sequence, a polynucleotide sequence of interest, a WPRE sequence, a poly(A) sequence, a ligation sequence (e.g., 3′ ligation sequence), and a ribozyme (e.g., 3′ ribozyme). In some embodiments, the DNA construct includes in 5′ to 3′ order: a ribozyme (e.g., 5′ ribozyme), a ligation sequence (e.g., 5′ ligation sequence), an IRES sequence, a polynucleotide sequence of interest, a WPRE sequence, a 3′ UTR sequence, a poly(A) sequence, a ligation sequence (e.g., 3′ ligation sequence), and a ribozyme (e.g., 3′ ribozyme).

[0232] In some embodiments, a ribozyme of the DNA construct is selected from the group consisting a twister ribozyme, twister sister (TS) ribozyme, a hammerhead ribozyme, a hairpin ribozyme, a hepatitis delta virus (HDV) ribozyme, a Varkud satellite (VS) ribozyme, a glucosamine-6-phosphate (GimS) ribozyme, a pistol ribozyme, and a hatchet ribozyme. In some embodiments, the 5′ ribozyme and the 3′ ribozyme are the same type of ribozymes. In other embodiments, the 5′ ribozyme and the 3′ ribozyme are different types of ribozymes. In some embodiments, the 5′ ribozyme or the 3′ ribozyme is a P1 twister ribozyme, an equivalent, and variant thereof. In some embodiments, the 5′ ribozyme or the 3′ ribozyme is a P3 twister ribozyme, an equivalent, and variant thereof. Both of the 5′ and 3′ ribozymes can be P1 twister ribozymes. In some cases, both of the 5′ and 3′ ribozymes are P1 twister ribozymes. In some instances, the 5′ ribozyme sequence comprises the nucleic acid of SEQ ID NO: 1349. In some instances, the 3′ ribozyme sequence comprises the nucleic acid of SEQ ID NO: 1350. In some instances, the 5′ ligation sequence comprises the nucleic acid of SEQ ID NO: 1351. In some instances, the 3′ ligation sequence comprises the nucleic acid of SEQ ID NO: 1352.

[0233] In some embodiments, the IRES of the DNA construct is any selected from the group consisting of a cricket paralysis virus IRES, a Homo sapiens IGF2 IRES, a hepatovirus A IRES, a hepatitis C virus H77 isolate IRES, a Homo sapiens FGF1 IRES, a bovine viral diarrhea virus 1 IRES, a human rhinovirus A89 IRES, a pan paniscus LIMA1, a human adenovirus 2 IRES, a Montana myotis leukoencephalitis virus IRES, a Homo sapiens RANBP3 IRES, a pestivirus giraffe 1 IRES, a Homo sapiens TGIF1 IRES, a human poliovirus 1 mahoney IRES, a foot-and-mouth disease virus type O IRES, an encephalomyocarditis virus 7A IRES, an encephalomyocarditis virus 6A IRES, an enterovirus 71 IRES, a coxsackievirus B3 IRES, and an IRES sequence provided in the sequence listing including in SEQ ID NOS: 1-1329, 1330-1348, and 1361-1391 and the figures such as FIGS. 17-19. In some embodiments, the IRES sequence is a nucleic acid sequence having at least 90%, e.g., at least 90%, 91%, 92%, 93%, 94%, 95%, 96%, 97%, 98%, 99% or more, sequence identity to any one of SEQ ID NOS: 1-1329, 1330-1348, and 1361-1391 and any one shown in FIGS. 17-19. In some embodiments, the WPRE sequence of the DNA construct is the nucleic acid sequence of SEQ ID NO:1353. In some embodiments, the WPRE sequence is a nucleic acid sequence having at least 90%, e.g., at least 90%, 91%, 92%, 93%, 94%, 95%, 96%, 97%, 98%, 99% or more sequence identity to of SEQ ID NO:1353. In some embodiments, the 3′UTR sequence of the DNA construct is any selected from the group consisting of an mtRNR1-AES 3′ UTR, an mtRNR1-LSP1 3′ UTR, an AES-mtRNR1 3′ UTR, an AES-hBg 3′ UTR, an FCGRT-hBg 3′ UTR, a 2hBg 3′ UTR, and a HBA1 3′ UTR, a 3′UTR sequence provided in the sequence listing including in SEQ ID NOS: 1354-1360 and 1384-1390 and the figures such as FIG. 19. In some embodiments, the 3′UTR sequence is a nucleic acid sequence having at least 90%, e.g., at least 90%, 91%, 92%, 93%, 94%, 95%, 96%, 97%, 98%, 99% or more, sequence identity to any one of SEQ ID NOS: 1354-1360 and 1384-1390 and any one shown in FIG. 19. In some embodiments, the poly(A) sequence of DNA construct is a stretch or chain of about 5-500, 10-500, 20-500, 50-500, 70-500, 80-500, 90-500, 100-500, 110-500, 120-500, 130-500, 140-500, 150-500, 160-500, 165-500, 170-500, 180-500, 190-500, 200-500, 10-200, 20-200, 30-200, 40-200, 50-200, 60-200, 70-200, 80-200, 90-200, 100-200, 50, 120, 150, 165, 200, 500, or more adenine nucleotides.

[0234] In some embodiments, the DNA construct comprises the IRES sequence, the WPRE sequence, and the poly(A) sequence of any depicted in SEQ ID NOs: 1381-1391 and FIG. 19. In some embodiments, the DNA construct comprises the IRES sequence, the WPRE sequence, a 3′ UTR sequence, and the poly(A) sequence of any depicted in SEQ ID NOs: 1384-1391 and FIG. 19. In some embodiments, the DNA construct comprises in 5′ to 3′ order: (i) a 5′ ligation sequence of SEQ ID NO: 1351, (ii) an IRES sequence of SEQ ID NO:1346 (encephalomycarditis virus 6A IRES), (iii) a polynucleotide sequence of interest, (iv) a WPRE sequence of SEQ ID NO: 1353, (v) a poly(A) sequence of 165 adenine nucleotides, and (vi) a 3′ ligation sequence of SEQ ID NO: 1352.

[0235] In some embodiments, the DNA construct comprises in 5′ to 3′ order: (i) a 5′ ribozyme of SEQ ID NO:1349, (ii) a 5′ ligation sequence of SEQ ID NO: 1351, (iii) an IRES sequence of SEQ ID NO:1346 (encephalomycarditis virus 6A IRES), (iv) a polynucleotide sequence of interest, (v) a WPRE sequence of SEQ ID NO: 1353, (vi) any 3′ UTR sequence provided herein, (vii) a poly(A) sequence of 165 adenine nucleotides, (viii) a 3′ ligation sequence of SEQ ID NO: 1352, and (ix) a 3′ ribozyme of SEQ ID NO:1350.

[0236] In some embodiments, the DNA construct comprises in 5′ to 3′ order: (i) a 5′ ribozyme of SEQ ID NO:1349, (ii) a 5′ ligation sequence of SEQ ID NO: 1351, (iii) an IRES sequence of SEQ ID NO:1346 (encephalomycarditis virus 6A IRES), (iv) a polynucleotide sequence of interest, (v) a WPRE sequence of SEQ ID NO: 1353, (vi) mtRNR1-AES 3′ UTR of SEQ ID NO: 1354, (vii) a poly(A) sequence of 165 adenine nucleotides, (viii) a 3′ ligation sequence of SEQ ID NO: 1352, and (ix) a 3′ ribozyme of SEQ ID NO:1350. In some embodiments, the DNA construct comprises in 5′ to 3′ order: (i) a 5′ ribozyme of SEQ ID NO:1349, (ii) a 5′ ligation sequence of SEQ ID NO: 1351, (iii) an IRES sequence of SEQ ID NO:1346 (encephalomycarditis virus 6A IRES), (iv) a polynucleotide sequence of interest, (v) a WPRE sequence of SEQ ID NO: 1353, (vi) mtRNR1-LSP1 3′ UTR of SEQ ID NO: 1355, (vii) a poly(A) sequence of 165 adenine nucleotides, (viii) a 3′ ligation sequence of SEQ ID NO: 1352, and (ix) a 3′ ribozyme of SEQ ID NO:1350. In some embodiments, the DNA construct comprises in 5′ to 3′ order: (i) a 5′ ribozyme of SEQ ID NO:1349, (ii) a 5′ ligation sequence of SEQ ID NO: 1351, (iii) an IRES sequence of SEQ ID NO:1346 (encephalomycarditis virus 6A IRES), (iv) a polynucleotide sequence of interest, (v) a WPRE sequence of SEQ ID NO: 1353, (vi) AES-mtRNR1 3′ UTR of SEQ ID NO: 1356, (vii) a poly(A) sequence of 165 adenine nucleotides, (viii) a 3′ ligation sequence of SEQ ID NO: 1352, and (ix) a 3′ ribozyme of SEQ ID NO:1350. In some embodiments, the DNA construct includes in 5′ to 3′ order: (i) a 5′ ribozyme of SEQ ID NO:1349, (ii) a 5′ ligation sequence of SEQ ID NO: 1351, (iii) an IRES sequence of SEQ ID NO:1346 (encephalomycarditis virus 6A IRES), (iv) a polynucleotide sequence of interest, (v) a WPRE sequence of SEQ ID NO: 1353, (vi) AES-hBg 3′ UTR of SEQ ID NO: 1357, (vii) a poly(A) sequence of 165 adenine nucleotides, (viii) a 3′ ligation sequence of SEQ ID NO: 1352, and (ix) a 3′ ribozyme of SEQ ID NO:1350. In some embodiments, the DNA construct comprises in 5′ to 3′ order: (i) a 5′ ribozyme of SEQ ID NO:1349, (ii) a 5′ ligation sequence of SEQ ID NO: 1351, (iii) an IRES sequence of SEQ ID NO:1346 (encephalomycarditis virus 6A IRES), (iv) a polynucleotide sequence of interest, (v) a WPRE sequence of SEQ ID NO: 1353, (vi) FCGRT-hBg 3′ UTR of SEQ ID NO: 1358, (vii) a poly(A) sequence of 165 adenine nucleotides, (viii) a 3′ ligation sequence of SEQ ID NO: 1352, and (ix) a 3′ ribozyme of SEQ ID NO:1350. In some embodiments, the DNA construct comprises in 5′ to 3′ order: (i) a 5′ ribozyme of SEQ ID NO:1349, (ii) a 5′ ligation sequence of SEQ ID NO: 1351, (iii) an IRES sequence of SEQ ID NO:1346 (encephalomycarditis virus 6A IRES), (iv) a polynucleotide sequence of interest, (v) a WPRE sequence of SEQ ID NO: 1353, (vi) 2hBG 3′ UTR of SEQ ID NO: 1359, (vii) a poly(A) sequence of 165 adenine nucleotides, (viii) a 3′ ligation sequence of SEQ ID NO: 1352, and (ix) a 3′ ribozyme of SEQ ID NO:1350. In some embodiments, the DNA construct comprises in 5′ to 3′ order: (i) a 5′ ribozyme of SEQ ID NO:1349, (ii) a 5′ ligation sequence of SEQ ID NO: 1351, (iii) an IRES sequence of SEQ ID NO:1346 (encephalomycarditis virus 6A IRES), (iv) a polynucleotide sequence of interest, (v) a WPRE sequence of SEQ ID NO: 1353, (vi) HBA1 3′ UTR of SEQ ID NO: 1360, (vii) a poly(A) sequence of 165 adenine nucleotides, (viii) a 3′ ligation sequence of SEQ ID NO: 1352, and (ix) a 3′ ribozyme of SEQ ID NO:1350.

[0237] In other embodiments, the DNA construct comprises in 5′ to 3′ order: (i) a 5′ ribozyme of SEQ ID NO:1349, (ii) a 5′ ligation sequence of SEQ ID NO: 1351, (iii) an IRES sequence of SEQ ID NO: 1348 (a coxsackievirus B3 IRES), (iv) a polynucleotide sequence of interest, (v) a WPRE sequence of SEQ ID NO: 1353, (vi) a poly(A) sequence of 165 adenine nucleotides, (vii) a 3′ ligation sequence of SEQ ID NO: 1352, and (viii) a 3′ ribozyme of SEQ ID NO:1350. In some embodiments, the DNA construct comprises in 5′ to 3′ order: (i) a 5′ ribozyme of SEQ ID NO:1349, (ii) a 5′ ligation sequence of SEQ ID NO: 1351, (iii) an IRES sequence of SEQ ID NO: 1348 (a coxsackievirus B3 IRES), (iv) a polynucleotide sequence of interest, (v) a WPRE sequence of SEQ ID NO: 1353, (vi) any 3′ UTR sequence provided herein, (vii) a poly(A) sequence of 165 adenine nucleotides, (viii) a 3′ ligation sequence of SEQ ID NO: 1352, and (ix) a 3′ ribozyme of SEQ ID NO:1350. In some embodiments, the DNA construct comprises in 5′ to 3′ order: (i) a 5′ ribozyme of SEQ ID NO:1349, (ii) a 5′ ligation sequence of SEQ ID NO: 1351, (iii) an IRES sequence of SEQ ID NO: 1348 (a coxsackievirus B3 IRES), (iv) a polynucleotide sequence of interest, (v) a WPRE sequence of SEQ ID NO: 1353, (vi) mtRNR1-AES 3′ UTR of SEQ ID NO: 1354, (vii) a poly(A) sequence of 165 adenine nucleotides, (viii) a 3′ ligation sequence of SEQ ID NO: 1352, and (ix) a 3′ ribozyme of SEQ ID NO:1350. In some embodiments, the DNA construct comprises in 5′ to 3′ order: (i) a 5′ ribozyme of SEQ ID NO:1349, (ii) a 5′ ligation sequence of SEQ ID NO: 1351, (iii) an IRES sequence of SEQ ID NO: 1348 (a coxsackievirus B3 IRES), (iv) a polynucleotide sequence of interest, (v) a WPRE sequence of SEQ ID NO: 1353, (vi) mtRNR1-LSP1 3′ UTR of SEQ ID NO: 1355, (vii) a poly(A) sequence of 165 adenine nucleotides, (viii) a 3′ ligation sequence of SEQ ID NO: 1352, and (ix) a 3′ ribozyme of SEQ ID NO:1350. In some embodiments, the DNA construct comprises in 5′ to 3′ order: (i) a 5′ ribozyme of SEQ ID NO:1349, (ii) a 5′ ligation sequence of SEQ ID NO: 1351, (iii) an IRES sequence of SEQ ID NO: 1348 (a coxsackievirus B3 IRES), (iv) a polynucleotide sequence of interest, (v) a WPRE sequence of SEQ ID NO: 1353, (vi) AES-mtRNR1 3′ UTR of SEQ ID NO: 1356, (vii) a poly(A) sequence of 165 adenine nucleotides, (viii) a 3′ ligation sequence of SEQ ID NO: 1352, and (ix) a 3′ ribozyme of SEQ ID NO:1350. In some embodiments, the DNA construct comprises in 5′ to 3′ order: (i) a 5′ ribozyme of SEQ ID NO:1349, (ii) a 5′ ligation sequence of SEQ ID NO: 1351, (iii) an IRES sequence of SEQ ID NO: 1348 (a coxsackievirus B3 IRES), (iv) a polynucleotide sequence of interest, (v) a WPRE sequence of SEQ ID NO: 1353, (vi) AES-hBg 3′ UTR of SEQ ID NO: 1357, (vii) a poly(A) sequence of 165 adenine nucleotides, (viii) a 3′ ligation sequence of SEQ ID NO: 1352, and (ix) a 3′ ribozyme of SEQ ID NO:1350. In some embodiments, the DNA construct comprises in 5′ to 3′ order: (i) a 5′ ribozyme of SEQ ID NO:1349, (ii) a 5′ ligation sequence of SEQ ID NO: 1351, (iii) an IRES sequence of SEQ ID NO: 1348 (a coxsackievirus B3 IRES), (iv) a polynucleotide sequence of interest, (v) a WPRE sequence of SEQ ID NO: 1353, (vi) FCGRT-hBg 3′ UTR of SEQ ID NO: 1358, (vii) a poly(A) sequence of 165 adenine nucleotides, (viii) a 3′ ligation sequence of SEQ ID NO: 1352, and (ix) a 3′ ribozyme of SEQ ID NO:1350. In some embodiments, the DNA construct comprises in 5′ to 3′ order: (i) a 5′ ribozyme of SEQ ID NO:1349, (ii) a 5′ ligation sequence of SEQ ID NO: 1351, (iii) an IRES sequence of SEQ ID NO: 1348 (a coxsackievirus B3 IRES), (iv) a polynucleotide sequence of interest, (v) a WPRE sequence of SEQ ID NO: 1353, (vi) 2hBG 3′ UTR of SEQ ID NO: 1359, (vii) a poly(A) sequence of 165 adenine nucleotides, (viii) a 3′ ligation sequence of SEQ ID NO: 1352, and (ix) a 3′ ribozyme of SEQ ID NO:1350. In some embodiments, the DNA construct comprises in 5′ to 3′ order: (i) a 5′ ribozyme of SEQ ID NO:1349, (ii) a 5′ ligation sequence of SEQ ID NO: 1351, (iii) an IRES sequence of SEQ ID NO: 1348 (a coxsackievirus B3 IRES), (iv) a polynucleotide sequence of interest, (v) a WPRE sequence of SEQ ID NO: 1353, (vi) HBA1 3′ UTR of SEQ ID NO: 1360, (vii) a poly(A) sequence of 165 adenine nucleotides, (viii) a 3′ ligation sequence of SEQ ID NO: 1352, and (ix) a 3′ ribozyme of SEQ ID NO:1350.

[0238] In some embodiments, a linear RNA polynucleotide molecule (such as a linear icRNA) is produced by in vitro transcription of the DNA construct to generate a linearized ribozyme-RNA construct, and then self-cleavage of the ribozyme containing RNA construct by way of the ribozymes. In some embodiments, a linear icRNA as well as a corresponding circular icRNA is produced in a cell expressing the DNA construct (including vector described below). Standard methods for introducing the DNA construct into a cell can be used.

[0239] In some embodiments, a linear icRNA is produced by from in vitro transcription of the DNA construct (or vector described below) to produce a linear ribozyme containing RNA polynucleotide (also referred to as a ribozyme-RNA polynucleotide or construct), and then the linear ribozyme containing RNA polynucleotide self-cleaves at the ribozyme sequences to produce a linear icRNA. The linear icRNA can then be administered to a subject, and after introduction of the linear icRNA into the cell, the linear icRNA can ligate and circularize in the presences of RNA ligase to form circular icRNA. As such, the cell can contain a linear icRNA as well as the corresponding circular icRNA. Methods for administering the DNA construct are described below.

[0240] In some embodiments, a linear icRNA is produced by administering the DNA construct (or vector described below) into a subject, such that a cell in the subject produces a linear ribozyme containing RNA polynucleotide by transcription, and then the linear ribozyme containing RNA polynucleotide self-cleaves at the ribozyme sequences to produce a linear icRNA. The linear icRNA in the cell can ligate and circularize in the presences of RNA ligase to form circular icRNA. As such, the cell can contain a linear icRNA as well as the corresponding circular icRNA. Methods for administering the DNA construct are described below.

[0241] Provided herein are linear RNA constructs comprising a ribozyme. In some embodiments, the linear RNA construct comprises a ribozyme at the 5′ end and a ribozyme at the 3′ end. Such linear RNA constructs can be referred to as linear or linearized ribozyme-RNA constructs. A linearized ribozyme-RNA construct can undergo self-cleavage to form a linear icRNA.

[0242] A linearized ribozyme-RNA construct can be produced from in vitro transcription of a linear or circular DNA construct described herein. In some embodiments, a linear linearized ribozyme-RNA construct is chemically or synthetically synthesized by standard method known in the art.

[0243] In some embodiments, when a linear or circular DNA construct described herein is introduced to a cell, the linearized ribozyme-RNA construct is produced by the cell. Furthermore, linear and circular icRNAs can be formed by the cell.

[0244] In some embodiments, the linearized ribozyme-RNA construct comprises in 5′ to 3′ order: a ribozyme (e.g., 5′ ribozyme), a ligation sequence (e.g., 5′ ligation sequence), an IRES sequence, a polynucleotide sequence of interest, a WPRE sequence, a poly(A) sequence, a ligation sequence (e.g., 3′ ligation sequence), and a ribozyme (e.g., 3′ ribozyme). In some embodiments, the DNA construct includes in 5′ to 3′ order: a ribozyme (e.g., 5′ ribozyme), a ligation sequence (e.g., 5′ ligation sequence), an IRES sequence, a polynucleotide sequence of interest, a WPRE sequence, a 3′ UTR sequence, a poly(A) sequence, a ligation sequence (e.g., 3′ ligation sequence), and a ribozyme (e.g., 3′ ribozyme).

[0245] In some embodiments, a ribozyme of the linearized ribozyme-RNA construct are selected from the group consisting a twister ribozyme, twister sister (TS) ribozyme, a hammerhead ribozyme, a hairpin ribozyme, a hepatitis delta virus (HDV) ribozyme, a Varkud satellite (VS) ribozyme, a glucosamine-6-phosphate (GimS) ribozyme, a pistol ribozyme, and a hatchet ribozyme. In some embodiments, the 5′ ribozyme and the 3′ ribozyme are the same type of ribozymes. In other embodiments, the 5′ ribozyme and the 3′ ribozyme are different types of ribozymes. In some embodiments, the 5′ ribozyme or the 3′ ribozyme is a P1 twister ribozyme, an equivalent, and variant thereof. In some embodiments, the 5′ ribozyme or the 3′ ribozyme is a P3 twister ribozyme, an equivalent, and variant thereof. Both of the 5′ and 3′ ribozymes can be P1 twister ribozymes. In some cases, both of the 5′ and 3′ ribozymes are P1 twister ribozymes. In some instances, the 5′ ribozyme sequence comprises the nucleic acid of SEQ ID NO: 1349, wherein the T nucleotides are U nucleotides in the RNA construct. The 5′ ribozyme sequence can comprise the sequence of SEQ ID NO: 1412. In some instances, the 3′ ribozyme sequence comprises the nucleic acid of SEQ ID NO: 1350 wherein the T nucleotides are U nucleotides in the RNA construct. The 3′ ribozyme sequence can comprise the sequence of SEQ ID NO: 1414. In some instances, the 5′ ligation sequence comprises the nucleic acid of SEQ ID NO: 1351 wherein the T nucleotides are U nucleotides in the RNA construct. In some instances, the 3′ ligation sequence comprises the nucleic acid of SEQ ID NO: 1352 wherein the T nucleotides are U nucleotides in the RNA construct.

[0246] In some embodiments, the IRES of the linearized ribozyme-RNA construct is any selected from the group consisting of a cricket paralysis virus IRES, a Homo sapiens IGF2 IRES, a hepatovirus A IRES, a hepatitis C virus H77 isolate IRES, a Homo sapiens FGF1 IRES, a bovine viral diarrhea virus 1 IRES, a human rhinovirus A89 IRES, a pan paniscus LIMA1, a human adenovirus 2 IRES, a Montana myotis leukoencephalitis virus IRES, a Homo sapiens RANBP3 IRES, a pestivirus giraffe 1 IRES, a Homo sapiens TGIF1 IRES, a human poliovirus 1 mahoney IRES, a foot-and-mouth disease virus type O IRES, an encephalomyocarditis virus 7A IRES, an encephalomyocarditis virus 6A IRES, an enterovirus 71 IRES, a coxsackievirus B3 IRES, and an IRES sequence provided in the sequence listing including in SEQ ID NOS: 1-1329, 1330-1348, and 1361-1391 and the figures such as FIGS. 17-19, wherein the T nucleotides are U nucleotides in the RNA construct. In some embodiments, the IRES sequence is a nucleic acid sequence having at least 90%, e.g., at least 90%, 91%, 92%, 93%, 94%, 95%, 96%, 97%, 98%, 99% or more, sequence identity to any one of SEQ ID NOS: 1-1329, 1330-1348, and 1361-1391 and any one shown in FIGS. 17-19, wherein the T nucleotides are U nucleotides in the RNA construct. In some embodiments, the WPRE sequence of the linearized ribozyme-RNA construct is the nucleic acid sequence of SEQ ID NO:1353, wherein the T nucleotides are U nucleotides in the RNA construct. In some embodiments, the WPRE sequence is a nucleic acid sequence having at least 90%, e.g., at least 90%, 91%, 92%, 93%, 94%, 95%, 96%, 97%, 98%, 99% or more sequence identity to of SEQ ID NO:1353, wherein the T nucleotides are U nucleotides in the RNA construct. In some embodiments, the 3′UTR sequence of the linearized ribozyme-RNA construct is any selected from the group consisting of an mtRNR1-AES 3′ UTR, an mtRNR1-LSP1 3′ UTR, an AES-mtRNR1 3′ UTR, an AES-hBg 3′ UTR, an FCGRT-hBg 3′ UTR, a 2hBg 3′ UTR, and a HBA1 3′ UTR, a 3′UTR sequence provided in the sequence listing including in SEQ ID NOS: 1354-1360 and 1384-1390 and the figures such as FIG. 19, wherein the T nucleotides are U nucleotides in the RNA construct. In some embodiments, the 3′UTR sequence is a nucleic acid sequence having at least 90%, e.g., at least 90%, 91%, 92%, 93%, 94%, 95%, 96%, 97%, 98%, 99% or more, sequence identity to any one of SEQ ID NOS: 1354-1360 and 1384-1390 and any one shown in FIG. 19. In some embodiments, the poly(A) sequence of the linearized ribozyme-RNA construct is a stretch or chain of about 5-500, 10-500, 20-500, 50-500, 70-500, 80-500, 90-500, 100-500, 110-500, 120-500, 130-500, 140-500, 150-500, 160-500, 165-500, 170-500, 180-500, 190-500, 200-500, 10-200, 20-200, 30-200, 40-200, 50-200, 60-200, 70-200, 80-200, 90-200, 100-200, 50, 120, 150, 165, 200, 500, or more adenine nucleotides.

[0247] In some embodiments, the linearized ribozyme-RNA construct comprises the IRES sequence, the WPRE sequence, and the poly(A) sequence of any depicted in SEQ ID NOs: 1381-1391 and FIG. 19, wherein the T nucleotides are U nucleotides in the RNA construct. In some embodiments, the linearized ribozyme-RNA construct comprises the IRES sequence, the WPRE sequence, a 3′ UTR sequence, and the poly(A) sequence of any depicted in SEQ ID NOs: 1384-1391 and FIG. 19, wherein the T nucleotides are U nucleotides in the RNA construct. In some embodiments, the linearized ribozyme-RNA construct comprises in 5′ to 3′ order: (i) a 5′ ligation sequence of SEQ ID NO: 1413, (ii) an IRES sequence of SEQ ID NO:1346 (encephalomycarditis virus 6A IRES), (iii) a polynucleotide sequence of interest, (iv) a WPRE sequence of SEQ ID NO: 1353, (v) a poly(A) sequence of 165 adenine nucleotides, and (vi) a 3′ ligation sequence of SEQ ID NO: 1415, wherein the T nucleotides are U nucleotides in the RNA construct.

[0248] In some embodiments, the linearized ribozyme-RNA construct comprises in 5′ to 3′ order: (i) a 5′ ribozyme of SEQ ID NO:1349, (ii) a 5′ ligation sequence of SEQ ID NO: 1413, (iii) an IRES sequence of SEQ ID NO:1346 (encephalomycarditis virus 6A IRES), (iv) a polynucleotide sequence of interest, (v) a WPRE sequence of SEQ ID NO: 1353, (vi) any 3′ UTR sequence provided herein, (vii) a poly(A) sequence of 165 adenine nucleotides, (viii) a 3′ ligation sequence of SEQ ID NO: 1415, and (ix) a 3′ ribozyme of SEQ ID NO:1350, wherein the T nucleotides are U nucleotides in the RNA construct.

[0249] In some embodiments, the linearized ribozyme-RNA construct comprises in 5′ to 3′ order: (i) a 5′ ribozyme of SEQ ID NO:1349, (ii) a 5′ ligation sequence of SEQ ID NO: 1413, (iii) an IRES sequence of SEQ ID NO:1346 (encephalomycarditis virus 6A IRES), (iv) a polynucleotide sequence of interest, (v) a WPRE sequence of SEQ ID NO: 1353, (vi) mtRNR1-AES 3′ UTR of SEQ ID NO: 1354, (vii) a poly(A) sequence of 165 adenine nucleotides, (viii) a 3′ ligation sequence of SEQ ID NO: 1415, and (ix) a 3′ ribozyme of SEQ ID NO:1350, wherein the T nucleotides are U nucleotides in the RNA construct. In some embodiments, the linearized ribozyme-RNA construct comprises in 5′ to 3′ order: (i) a 5′ ribozyme of SEQ ID NO:1349, (ii) a 5′ ligation sequence of SEQ ID NO: 1413, (iii) an IRES sequence of SEQ ID NO:1346 (encephalomycarditis virus 6A IRES), (iv) a polynucleotide sequence of interest, (v) a WPRE sequence of SEQ ID NO: 1353, (vi) mtRNR1-LSP1 3′ UTR of SEQ ID NO: 1355, (vii) a poly(A) sequence of 165 adenine nucleotides, (viii) a 3′ ligation sequence of SEQ ID NO: 1415, and (ix) a 3′ ribozyme of SEQ ID NO:1350, wherein the T nucleotides are U nucleotides in the RNA construct. In some embodiments, the linearized ribozyme-RNA construct comprises in 5′ to 3′ order: (i) a 5′ ribozyme of SEQ ID NO:1349, (ii) a 5′ ligation sequence of SEQ ID NO: 1413, (iii) an IRES sequence of SEQ ID NO:1346 (encephalomycarditis virus 6A IRES), (iv) a polynucleotide sequence of interest, (v) a WPRE sequence of SEQ ID NO: 1353, (vi) AES-mtRNR1 3′ UTR of SEQ ID NO: 1356, (vii) a poly(A) sequence of 165 adenine nucleotides, (viii) a 3′ ligation sequence of SEQ ID NO: 1415, and (ix) a 3′ ribozyme of SEQ ID NO:1350, wherein the T nucleotides are U nucleotides in the RNA construct. In some embodiments, the linearized ribozyme-RNA construct includes in 5′ to 3′ order: (i) a 5′ ribozyme of SEQ ID NO:1349, (ii) a 5′ ligation sequence of SEQ ID NO: 1413, (iii) an IRES sequence of SEQ ID NO:1346 (encephalomycarditis virus 6A IRES), (iv) a polynucleotide sequence of interest, (v) a WPRE sequence of SEQ ID NO: 1353, (vi) AES-hBg 3′ UTR of SEQ ID NO: 1357, (vii) a poly(A) sequence of 165 adenine nucleotides, (viii) a 3′ ligation sequence of SEQ ID NO: 1415, and (ix) a 3′ ribozyme of SEQ ID NO:1350, wherein the T nucleotides are U nucleotides in the RNA construct. In some embodiments, the linearized ribozyme-RNA construct comprises in 5′ to 3′ order: (i) a 5′ ribozyme of SEQ ID NO:1349, (ii) a 5′ ligation sequence of SEQ ID NO: 1413, (iii) an IRES sequence of SEQ ID NO:1346 (encephalomycarditis virus 6A IRES), (iv) a polynucleotide sequence of interest, (v) a WPRE sequence of SEQ ID NO: 1353, (vi) FCGRT-hBg 3′ UTR of SEQ ID NO: 1358, (vii) a poly(A) sequence of 165 adenine nucleotides, (viii) a 3′ ligation sequence of SEQ ID NO: 1415, and (ix) a 3′ ribozyme of SEQ ID NO:1350, wherein the T nucleotides are U nucleotides in the RNA construct. In some embodiments, the linearized ribozyme-RNA construct comprises in 5′ to 3′ order: (i) a 5′ ribozyme of SEQ ID NO:1349, (ii) a 5′ ligation sequence of SEQ ID NO: 1413, (iii) an IRES sequence of SEQ ID NO:1346 (encephalomycarditis virus 6A IRES), (iv) a polynucleotide sequence of interest, (v) a WPRE sequence of SEQ ID NO: 1353, (vi) 2hBG 3′ UTR of SEQ ID NO: 1359, (vii) a poly(A) sequence of 165 adenine nucleotides, (viii) a 3′ ligation sequence of SEQ ID NO: 1415, and (ix) a 3′ ribozyme of SEQ ID NO:1350, wherein the T nucleotides are U nucleotides in the RNA construct. In some embodiments, the linearized ribozyme-RNA construct comprises in 5′ to 3′ order: (i) a 5′ ribozyme of SEQ ID NO:1349, (ii) a 5′ ligation sequence of SEQ ID NO: 1413, (iii) an IRES sequence of SEQ ID NO:1346 (encephalomycarditis virus 6A IRES), (iv) a polynucleotide sequence of interest, (v) a WPRE sequence of SEQ ID NO: 1353, (vi) HBA1 3′ UTR of SEQ ID NO: 1360, (vii) a poly(A) sequence of 165 adenine nucleotides, (viii) a 3′ ligation sequence of SEQ ID NO: 1415, and (ix) a 3′ ribozyme of SEQ ID NO:1350, wherein the T nucleotides are U nucleotides in the RNA construct.

[0250] In other embodiments, the linearized ribozyme-RNA construct comprises in 5′ to 3′ order: (i) a 5′ ribozyme of SEQ ID NO:1349, (ii) a 5′ ligation sequence of SEQ ID NO: 1413, (iii) an IRES sequence of SEQ ID NO: 1348 (a coxsackievirus B3 IRES), (iv) a polynucleotide sequence of interest, (v) a WPRE sequence of SEQ ID NO: 1353, (vi) a poly(A) sequence of 165 adenine nucleotides, (vii) a 3′ ligation sequence of SEQ ID NO: 1415, and (viii) a 3′ ribozyme of SEQ ID NO:1350, wherein the T nucleotides are U nucleotides in the RNA construct. In some embodiments, the linearized ribozyme-RNA construct comprises in 5′ to 3′ order: (i) a 5′ ribozyme of SEQ ID NO:1349, (ii) a 5′ ligation sequence of SEQ ID NO: 1413, (iii) an IRES sequence of SEQ ID NO: 1348 (a coxsackievirus B3 IRES), (iv) a polynucleotide sequence of interest, (v) a WPRE sequence of SEQ ID NO: 1353, (vi) any 3′ UTR sequence provided herein, (vii) a poly(A) sequence of 165 adenine nucleotides, (viii) a 3′ ligation sequence of SEQ ID NO: 1415, and (ix) a 3′ ribozyme of SEQ ID NO:1350, wherein the T nucleotides are U nucleotides in the RNA construct. In some embodiments, the linearized ribozyme-RNA construct comprises in 5′ to 3′ order: (i) a 5′ ribozyme of SEQ ID NO:1349, (ii) a 5′ ligation sequence of SEQ ID NO: 1413, (iii) an IRES sequence of SEQ ID NO: 1348 (a coxsackievirus B3 IRES), (iv) a polynucleotide sequence of interest, (v) a WPRE sequence of SEQ ID NO: 1353, (vi) mtRNR1-AES 3′ UTR of SEQ ID NO: 1354, (vii) a poly(A) sequence of 165 adenine nucleotides, (viii) a 3′ ligation sequence of SEQ ID NO: 1415, and (ix) a 3′ ribozyme of SEQ ID NO:1350, wherein the T nucleotides are U nucleotides in the RNA construct. In some embodiments, the linearized ribozyme-RNA construct comprises in 5′ to 3′ order: (i) a 5′ ribozyme of SEQ ID NO:1349, (ii) a 5′ ligation sequence of SEQ ID NO: 1413, (iii) an IRES sequence of SEQ ID NO: 1348 (a coxsackievirus B3 IRES), (iv) a polynucleotide sequence of interest, (v) a WPRE sequence of SEQ ID NO: 1353, (vi) mtRNR1-LSP1 3′ UTR of SEQ ID NO: 1355, (vii) a poly(A) sequence of 165 adenine nucleotides, (viii) a 3′ ligation sequence of SEQ ID NO: 1415, and (ix) a 3′ ribozyme of SEQ ID NO:1350, wherein the T nucleotides are U nucleotides in the RNA construct. In some embodiments, the linearized ribozyme-RNA construct comprises in 5′ to 3′ order: (i) a 5′ ribozyme of SEQ ID NO:1349, (ii) a 5′ ligation sequence of SEQ ID NO: 1413, (iii) an IRES sequence of SEQ ID NO: 1348 (a coxsackievirus B3 IRES), (iv) a polynucleotide sequence of interest, (v) a WPRE sequence of SEQ ID NO: 1353, (vi) AES-mtRNR1 3′ UTR of SEQ ID NO: 1356, (vii) a poly(A) sequence of 165 adenine nucleotides, (viii) a 3′ ligation sequence of SEQ ID NO: 1415, and (ix) a 3′ ribozyme of SEQ ID NO:1350, wherein the T nucleotides are U nucleotides in the RNA construct. In some embodiments, the linearized ribozyme-RNA construct comprises in 5′ to 3′ order: (i) a 5′ ribozyme of SEQ ID NO:1349, (ii) a 5′ ligation sequence of SEQ ID NO: 1413, (iii) an IRES sequence of SEQ ID NO: 1348 (a coxsackievirus B3 IRES), (iv) a polynucleotide sequence of interest, (v) a WPRE sequence of SEQ ID NO: 1353, (vi) AES-hBg 3′ UTR of SEQ ID NO: 1357, (vii) a poly(A) sequence of 165 adenine nucleotides, (viii) a 3′ ligation sequence of SEQ ID NO: 1415, and (ix) a 3′ ribozyme of SEQ ID NO:1350, wherein the T nucleotides are U nucleotides in the RNA construct. In some embodiments, the linearized ribozyme-RNA construct comprises in 5′ to 3′ order: (i) a 5′ ribozyme of SEQ ID NO:1349, (ii) a 5′ ligation sequence of SEQ ID NO: 1413, (iii) an IRES sequence of SEQ ID NO: 1348 (a coxsackievirus B3 IRES), (iv) a polynucleotide sequence of interest, (v) a WPRE sequence of SEQ ID NO: 1353, (vi) FCGRT-hBg 3′ UTR of SEQ ID NO: 1358, (vii) a poly(A) sequence of 165 adenine nucleotides, (viii) a 3′ ligation sequence of SEQ ID NO: 1415, and (ix) a 3′ ribozyme of SEQ ID NO:1350, wherein the T nucleotides are U nucleotides in the RNA construct. In some embodiments, the linearized ribozyme-RNA construct comprises in 5′ to 3′ order: (i) a 5′ ribozyme of SEQ ID NO:1349, (ii) a 5′ ligation sequence of SEQ ID NO: 1415, (iii) an IRES sequence of SEQ ID NO: 1348 (a coxsackievirus B3 IRES), (iv) a polynucleotide sequence of interest, (v) a WPRE sequence of SEQ ID NO: 1353, (vi) 2hBG 3′ UTR of SEQ ID NO: 1359, (vii) a poly(A) sequence of 165 adenine nucleotides, (viii) a 3′ ligation sequence of SEQ ID NO: 1415, and (ix) a 3′ ribozyme of SEQ ID NO:1350, wherein the T nucleotides are U nucleotides in the RNA construct. In some embodiments, the linearized ribozyme-RNA construct comprises in 5′ to 3′ order: (i) a 5′ ribozyme of SEQ ID NO:1349, (ii) a 5′ ligation sequence of SEQ ID NO: 1415, (iii) an IRES sequence of SEQ ID NO: 1348 (a coxsackievirus B3 IRES), (iv) a polynucleotide sequence of interest, (v) a WPRE sequence of SEQ ID NO: 1353, (vi) HBA1 3′ UTR of SEQ ID NO: 1360, (vii) a poly(A) sequence of 165 adenine nucleotides, (viii) a 3′ ligation sequence of SEQ ID NO: 1415, and (ix) a 3′ ribozyme of SEQ ID NO:1350, wherein the T nucleotides are U nucleotides in the RNA construct.

[0251] As described above, a linearized ribozyme-RNA construct that is a precursor form of a linearized ribozyme activated RNA construct includes two ligation sequences located at opposite ends of the linearized ribozyme-RNA construct (e.g., a 5′ ligation sequence and a 3′ ligation sequence), as well as two ribozyme sequences located at opposite ends of the linearized ribozyme-RNA construct (e.g., a 5′ ribozyme sequence and a 3′ ribozyme sequence). In some embodiments, the ligation sequence and ribozyme sequence are complementary. In some embodiments, the 5′ ligation sequence and 5′ ribozyme sequence are complementary. In some embodiments, the 3′ ligation sequence and 3′ ribozyme sequence are complementary. In some embodiments, the 5′ ligation sequence and 5′ ribozyme sequence are complementary, and the 3′ ligation sequence and 3′ ribozyme sequence are complementary. In some embodiments, the ligation sequence and ribozyme sequence are partially complementary. In some embodiments, the 5′ ligation sequence and 5′ ribozyme sequence are partially complementary. In some embodiments, the 3′ ligation sequence and 3′ ribozyme sequence are partially complementary. In some embodiments, the 5′ ligation sequence and 5′ ribozyme sequence are partially complementary, and the 3′ ligation sequence and 3′ ribozyme sequence are partially complementary. In some embodiments, the ligation sequence or a portion and the ribozyme sequence or a portion thereof hybridize together in a cell and/or in standard in vitro conditions. In some embodiments, the ligation sequence or a portion and the ribozyme sequence or a portion are at least 85%, e.g., at least 85%, 86%, 87%, 88%, 89%, 90%, 91%, 92%, 93%, 94%, 95%, 96%, 97%, 98%, 99% or more complementary over the length of one of the sequences. In some embodiments, the ligation sequence or a portion and the ribozyme sequence or a portion are 100% complementary over the length of at least one of the sequences. In some embodiments, the 5′ ligation sequence or a portion and the 5′ ribozyme sequence or a portion thereof hybridize together in a cell and/or in standard in vitro conditions. In some embodiments, the 5′ ligation sequence or a portion and the 5′ ribozyme sequence or a portion are at least 85%, e.g., at least 85%, 86%, 87%, 88%, 89%, 90%, 91%, 92%, 93%, 94%, 95%, 96%, 97%, 98%, 99% or more complementary over the length of one of the sequences. In some embodiments, the 5′ ligation sequence or a portion and the 5′ ribozyme sequence or a portion are 100% complementary over the length of at least one of the sequences. In some embodiments, the 3′ ligation sequence or a portion and the 3′ ribozyme sequence or a portion thereof hybridize together in a cell and/or in standard in vitro conditions. In some embodiments, the 3′ ligation sequence or a portion and the 3′ ribozyme sequence or a portion are at least 85%, e.g., at least 85%, 86%, 87%, 88%, 89%, 90%, 91%, 92%, 93%, 94%, 95%, 96%, 97%, 98%, 99% or more complementary over the length of one of the sequences. In some embodiments, the 3′ ligation sequence or a portion and the 3′ ribozyme sequence or a portion are 100% complementary over the length of at least one of the sequences. In some instances, the 5′ ligation sequence is at least 85%, e.g., at least 85%, 86%, 87%, 88%, 89%, 90%, 91%, 92%, 93%, 94%, 95%, 96%, 97%, 98%, 99% or more complementary to the 5′ ribozyme sequence. In some instances, the 3′ ligation sequence is at least 85%, e.g., at least 85%, 86%, 87%, 88%, 89%, 90%, 91%, 92%, 93%, 94%, 95%, 96%, 97%, 98%, 99% or more complementary to the 3′ ribozyme sequence. In some embodiments, the linearized ribozyme activated RNA construct is found in a structure where the 5′ ligation sequence and the 5′ ribozyme sequence hybridize (see, for example, the linearized ribozyme-RNA construct in FIGS. 1A and 7A). In some embodiments, the linearized ribozyme activated RNA construct is found in a structure where the 3′ ligation sequence and the 3′ ribozyme sequence hybridize (see, for example, the linearized ribozyme-RNA construct in FIGS. 1A and 7A). In some embodiments, the 5′ ribozyme sequence or the 3′ ribozyme sequence comprises the nucleic acid sequence of SEQ ID NO: 1349. In some embodiments, the 5′ ribozyme sequence or the 3′ ribozyme sequence comprises a nucleic acid sequence having at least 90%, e.g., at least 90%, 91%, 92%, 93%, 94%, 95%, 96%, 97%, 98%, 99% or more sequence identity to SEQ ID NO: 1349. In some cases, the 5′ and 3′ ribozyme sequences both comprise the nucleic acid sequence of SEQ ID NO: 1349. In several embodiments, the 5′ ribozyme sequence or the 3′ ribozyme sequence comprises the nucleic acid sequence of SEQ ID NO: 1350. In various embodiments, the 5′ ribozyme sequence or the 3′ ribozyme sequence comprises a nucleic acid sequence having at least 90%, e.g., at least 90%, 91%, 92%, 93%, 94%, 95%, 96%, 97%, 98%, 99% or more sequence identity to SEQ ID NO: 1350. In some instances, the 5′ and 3′ ribozyme sequences both comprise the nucleic acid sequence of SEQ ID NO: 1350. The 5′ and 3′ ribozyme sequences can comprise the same nucleic acid sequence. The 5′ and 3′ ribozyme sequences can comprise different nucleic acid sequences. In some embodiments, the 5′ ribozyme sequence is SEQ ID NO: 1349 and the 3′ ribozyme sequence is SEQ ID NO: 1350. In some instances, a portion of the 5′ ribozyme sequence is complementary to a portion the 5′ ligation sequence of a linearized ribozyme-RNA construct. In some instances, a portion of the 3′ ribozyme sequence is complementary to a portion the 3′ ligation sequence of a linearized ribozyme-RNA construct. In some embodiments, the 5′ ligation sequence or the 3′ ligation sequence includes the nucleic acid sequence of SEQ ID NO: 1413. In some embodiments, the 5′ ligation sequence or the 3′ ligation sequence includes a nucleic acid sequence having at least 90%, e.g., at least 90%, 91%, 92%, 93%, 94%, 95%, 96%, 97%, 98%, 99% or more sequence identity to SEQ ID NO: 1413. In some cases, the 5′ and 3′ ligation sequences both comprise the nucleic acid sequence of SEQ ID NO: 1413. In several embodiments, the 5′ ligation sequence or the 3′ ligation sequence includes the nucleic acid sequence of SEQ ID NO: 1415. In various embodiments, the 5′ ligation sequence or the 3′ ligation sequence comprises a nucleic acid sequence having at least 90%, e.g., at least 90%, 91%, 92%, 93%, 94%, 95%, 96%, 97%, 98%, 99% or more sequence identity to SEQ ID NO: 1415. In some instances, the 5′ and 3′ ligation sequences both comprise the nucleic acid sequence of SEQ ID NO: 1415. The 5′ and 3′ ligation sequences can comprise the same nucleic acid sequence. The 5′ and 3′ ligation sequences can have the same nucleic acid sequence. The 5′ and 3′ ligation sequences can comprise different nucleic acid sequences. The 5′ and 3′ ligation sequences can have different nucleic acid sequences. In some embodiments, the 5′ ligation sequence is SEQ ID NO: 1413 and the 3′ ligation sequence is SEQ ID NO: 1415. In some instances, a portion of the 5′ ligation sequence is complementary to a portion the 3′ ligation sequence of a linearized ribozyme-RNA construct.

[0252] Concurrently, to enable compatibility between persistence of expression and immunogenicity, the LORAX protein engineering platform was developed, the platform can be applied iteratively to tackle particularly challenging multiplexed protein engineering tasks by exploring huge swaths of combinatorial mutation space unapproachable using previous techniques. Furthermore, while this methodology is particularly suited to the unique challenges of protein de-immunization, it is also applicable to any potential protein engineering goal, so long as there exists an appropriate screening procedure to select for the desired protein functionality.

[0253] Provided herein are in situ circularized RNAs (icRNAs) including circular icRNAs, linear icRNAs comprising hybridized ligation sequences, and linear ribozyme-RNA constructs comprising ribozymes as well as DNA constructs encoding such icRNAs and ribozyme-RNA constructs that are useful for applications such as, but not limited to, those based on RNA replacement, RNA editing, RNA regulation, RNA vaccines, protein production, and protein replacement. In some embodiments, the icRNAs are used in RNA-based therapies for the treatment and prophylactic treatment of a disease or condition in a subject, e.g., a human subject. In some embodiments, the linear icRNAs are used in RNA-based therapies for the treatment and prophylactic treatment of a disease or condition in a subject, e.g., a human subject. In some embodiments, the circular icRNAs are used in RNA-based therapies for the treatment and prophylactic treatment of a disease or condition in a subject, e.g., a human subject.

[0254] In some embodiments, linear icRNAs can be introduced or delivered to in vitro cells such as in vitro human cells. In certain embodiments, linear icRNAs can be introduced or delivered to ex vivo cells such as ex vivo human cells. In certain embodiments, linear icRNAs can be introduced or delivered to cells in vivo. In several embodiments, linear icRNAs can be introduced, delivered, or administered to a subject such as a human subject.

[0255] In some embodiments, linear ribozyme-RNA constructs can be introduced or delivered to in vitro cells such as in vitro human cells. In many embodiments, linear ribozyme-RNA constructs can be introduced or delivered to ex vivo cells such as ex vivo human cells. In certain embodiments, linear ribozyme-RNA constructs can be introduced or delivered to cells in vivo. In several embodiments, linear ribozyme-RNA constructs can be introduced, delivered, or administered to a subject such as a human subject.

[0256] In some embodiments, DNA constructs encoding linear icRNAs can be introduced or delivered to in vitro cells such as in vitro human cells. In many embodiments, DNA constructs encoding linear icRNAs can be introduced or delivered to ex vivo cells such as ex vivo human cells. In certain embodiments, DNA constructs encoding linear icRNAs can be introduced or delivered to cells in vivo. In several embodiments, DNA constructs encoding linear icRNAs can be introduced, delivered, or administered to a subject such as a human subject.

[0257] Looking ahead, in addition to its core utility in applications entailing transgene delivery, it is anticipated that icRNAs will be particularly useful in scenarios where a longer duration pulse of protein production is required. These applications include, but are not limited to, for instance, (1) epigenome engineering, (2) cellular reprogramming, (3) transient healing, and (4) rejuvenation applications.

[0258] Additionally, icRNA activity and versatility could be further bolstered by: inserting into a construct described herein a self-amplifying RNA payloads and/or inserting a Gag RNA fragment such as SEQ ID NO: 1416, wherein T nucleotides are U nucleotides to enable the packaging of icRNAs into viral like particles via co-expression of Gag protein. Taken together, it is expected that the simple and scalable icRNA methodology could have broad utility in basic science and therapeutic applications.

[0259] The RNA constructs of the disclosure have great utility in gene therapy space to treat widespread diseases. In both type 1 and type 2 diabetes, insulin production is limited and therefore patients commonly must exogenously administer insulin when their blood glucose levels rise. The inducible ribozyme-mediated RNA-construct (icRNA) system described herein can be adapted to contain two halves of the insulin gene fused to intronic sequences. The two constructs are constitutively present in muscular tissue, but one half would only be transcribed upon additional of an aptamer-binding ligand such as a synthetic sugar. This would lead to the rapid upregulation of ribozyme-mediated hybridization and splicing to generate the full length, functional insulin protein. Upon degradation of the inducer, the one fusion fragment would become repressed and no more insulin would be produced until more of the ligand is administered, thus replacing the need for painful and burdensome exogenous administration of insulin with an endogenous system with precise temporal control.

[0260] The inducible ribozyme-mediated RNA-construct system described herein can be applied to generate an inducible gene expression system for the clotting factor IX for patients with hemophilia, the cystic fibrosis transmembrane conductance regulator protein for patients with cystic fibrosis, and the dystrophin protein for patients with Duchenne's muscular dystrophy. Broadly, any disease that results from a poorly expressed or mutated protein could benefit from the inducible ribozyme-mediated RNA-construct system disclosed herein. This includes, but is not limited to, disease such as β-thalassemia, severe combined immunodeficiency, spinal muscle atrophy, and age-related macular degeneration.

[0261] The inducible ribozyme-mediated RNA-construct system described herein can be broadly applied to gene therapies using the CRISPR/Cas toolset. CRISPR/Cas genome editing is highly adaptable and has been engineered to investigate and treat genetic diseases, cancers, immunological diseases, and infectious diseases. A major limitation in the translation of these therapies is the inability to control the expression of the Cas protein in vivo. The inducible ribozyme-mediated RNA-construct system described herein can overcome this limitation by fusing two portions of the Cas protein to intronic sequences in separate RNA constructs. One of these would be under the control of an inducer, making the expression of the Cas protein and its subsequent function completely inducible. This would enable precise control over the genome editing that is mediated by the CRISPR/Cas system. It is not limited to gene knockouts and could be broadly adapted to aid in controlled and inducible non-homologous end joining, homology directed repair, single-base exchanges, transcriptional regulation, base editors, PRIME editors, and RNA editing.

[0262] This system is further tunable as the AAV serotype used can be altered without having to alter the expression plasmid. Various serotypes can be used which specifically target tissues such as AAV8 for the liver, AAV9 for skeletal muscle, or AAV-PHP.B for the central nervous system. Furthermore, engineered recombinant AAVs which specifically target distinct cell types can also be utilized in addition to the broad range of serotypes already available to further enhance the specificity of the partial reprogramming system.

[0263] Utilizing the system described herein for the in vivo control of reprogramming factors, the system can be harnessed for a broad range of applications.

[0264] Generally, transient expression of the Yamanaka factors in vivo has been demonstrated to ameliorate aging hallmarks. The system of the disclosure with OSKM and the 3′-UTR aptazyme could be packaged into an AAV, designed to either have broad tropism across the body, or targeted to a specific organ via an engineered AAV. This could then be administered to the subject and allowed to transduce its target organs for a short period of time. Subsequently, the ligand that is specific for the aptamer sequence could be administered at the desired dose and treatment regimen in order to achieve cyclic expression of OSKM. The physiological alterations induced by this approach could include a reduction in the DNA damage response associated with aging, downregulation of senescence and stress-related genes, and alterations to the epigenetic modifications that occur with aging. These molecular alterations at the cellular level have important implications for reducing the systematic aging issues. Furthermore, in the context of specific diseases related to aging, such as Hutchinson-Gilford Progeria syndrome, this strategy can be an important therapeutic option to systematically reduce physiological hallmarks of aging while also prolonging the lifespan of those affected.

[0265] On the tissue-specific level, the system of the disclosure can demonstrate an important therapeutic benefit as engineering of the AAV capsid can be utilized for cell-specific targeting of the inducible-reprogramming strategy. In the central nervous system, transient expression of OSK could be utilized to restore youthful DNA methylation patterns and transcriptomes in the retinal ganglion cells in order to promote axonal regeneration after injury and promote vision restoration for the aging population or those afflicted with visual impairments such as glaucoma. Similarly, targeting the system of the disclosure to specific brain regions (e.g., hippocampus) can be an important tool for improving memory through specific targeting of dentate gyrus cells. In the cardiovascular system, targeting the system of the disclosure to cardiomyocytes can lead to dedifferentiation of these post-mitotic cells. This enabled regenerative capacity has the potential to broadly improve cardiac function with the potential to greatly improve cardiomyocyte recovery following traumatic events such as myocardial infarction. Administration of the inducible OSKM construct as described herein and then treating the afflicted individual with the inducing ligand could drastically improve recovery from cardiovascular events. Furthermore, myofiber- and liver-specific transient expression mediated by the system of the disclosure has the ability to promote muscle regeneration in vivo, which has broad implications in both the aging and diseased setting.

[0266] Aside from induced AAV-aptazyme mediated expression of OSKM, the methods and compositions of the disclosure can be applied to other reprogramming transcription factors (TFs) as well. Depending on the outcome desired, TFs could be delivered either individually or in combination with either matching aptazyme sequences or separate aptazymes to enable temporal control of gene expression. These engineered TFs can be applied to the healthy and diseased settings with even broader implications for the whole field of regenerative medicine. The iAAV-partial reprogramming approach of the disclosure has broad applications across a diverse array of organ systems and disease settings.

[0267] RNA is inherently transient and this transience impacts their activity both as an interacting moiety as well as a template. Circularization of RNA polynucleotides improves their persistence, however simple and scalable approaches to achieve the same are lacking. Utilizing autocatalytic RNA circularization as described herein, the disclosure provides compositions and methods of in situ circularized RNAs (icRNAs) for durable protein translation. Specifically, an in vitro transcribed linear RNA that bears an internal ribosome entry site coupled to a messenger RNA of interest that is in turn flanked by ribozymes is provided. Once transcribed, the flanking twister ribozymes rapidly self-cleave, enabling hybridization of the complementary ligation stems to one another to generate circular RNAs. For example, delivery of linear RNAs into cells yields in situ circularized molecules upon autocatalytic cleavage of the ribozymes that leave termini which are ligated by endogenous RNA ligases. This scalable icRNA system has broad utility in basic science and therapeutic applications.

[0268] Compositions herein can be used to treat a disease or condition in a subject. For example, a ribozyme-activated RNA construct (e.g., a linear icRNA or a circular icRNA) of the disclosure can be administered to treat a disease described herein.

[0269] A pharmaceutical composition can comprise a first active ingredient. The first active ingredient can comprise a ribozyme-activated RNA construct of the disclosure. The pharmaceutical composition can be formulated in unit dose form. The pharmaceutical composition can comprise a pharmaceutically acceptable excipient, diluent, or carrier. The pharmaceutical composition can comprise a second, third, or fourth active ingredient.

[0270] A composition described herein can compromise an excipient. In some cases, an excipient can comprise a pharmaceutically acceptable excipient. An excipient can comprise a cryo-preservative, such as DMSO, glycerol, polyvinylpyrrolidone (PVP), or any combination thereof. An excipient can comprise a cryo-preservative, such as a sucrose, a trehalose, a starch, a salt of any of these, a derivative of any of these, or any combination thereof. An excipient can comprise a pH agent (to minimize oxidation or degradation of a component of the composition), a stabilizing agent (to prevent modification or degradation of a component of the composition), a buffering agent (to enhance temperature stability), a solubilizing agent (to increase protein solubility), or any combination thereof. An excipient can comprise a surfactant, a sugar, an amino acid, an antioxidant, a salt, a non-ionic surfactant, a solubilizer, a triglyceride, an alcohol, or any combination thereof. An excipient can comprise sodium carbonate, acetate, citrate, phosphate, poly-ethylene glycol (PEG), sorbitol, sucrose, trehalose, polysorbate 80, sodium phosphate, sucrose, disodium phosphate, mannitol, polysorbate 20, histidine, citrate, albumin, sodium hydroxide, glycine, sodium citrate, trehalose, arginine, sodium acetate, acetate, HCl, disodium edetate, lecithin, glycerin, xanthan rubber, soy isoflavones, polysorbate 80, ethyl alcohol, water, teprenone, or any combination thereof. In some cases, a carrier or a diluent can comprise an excipient. In some cases, a carrier or diluent can comprise a water, a salt solution (e.g., a saline), an alcohol or any combination thereof.

[0271] Non-limiting examples of suitable excipients can include a buffering agent, a preservative, a stabilizer, a binder, a compaction agent, a lubricant, a chelator, a dispersion enhancer, a disintegration agent, a flavoring agent, a sweetener, a coloring agent or any combination thereof.

[0272] In some cases, an excipient can be a buffering agent. Non-limiting examples of suitable buffering agents can include sodium citrate, magnesium carbonate, magnesium bicarbonate, calcium carbonate, and calcium bicarbonate. Other buffering agent include, but are not limited to, sodium bicarbonate, potassium bicarbonate, magnesium hydroxide, magnesium lactate, magnesium glucomate, aluminum hydroxide, sodium citrate, sodium tartrate, sodium acetate, sodium carbonate, sodium polyphosphate, potassium polyphosphate, sodium pyrophosphate, potassium pyrophosphate, disodium hydrogen phosphate, dipotassium hydrogen phosphate, trisodium phosphate, tripotassium phosphate, potassium metaphosphate, magnesium oxide, magnesium hydroxide, magnesium carbonate, magnesium silicate, calcium acetate, calcium glycerophosphate, calcium chloride, calcium hydroxide and other calcium salts or combinations thereof can be used in a pharmaceutical formulation.

[0273] In some cases, an excipient can comprise a preservative. Non-limiting examples of suitable preservatives can include antioxidants, such as alpha-tocopherol and ascorbate, and antimicrobials, such as parabens, chlorobutanol, and phenol. Antioxidants can further include, but not limited to, EDTA, citric acid, ascorbic acid, butylated hydroxytoluene (BHT), butylated hydroxy anisole (BHA), sodium sulfite, p-amino benzoic acid, glutathione, propyl gallate, cysteine, methionine, ethanol and N-acetyl cysteine. In some instances a preservatives can include validamycin A, TL-3, sodium ortho vanadate, sodium fluoride, N-a-tosyl-Phe-chloromethylketone, N-a-tosyl-Lys-chloromethylketone, aprotinin, phenylmethylsulfonyl fluoride, diisopropylfluorophosphate, kinase inhibitor, phosphatase inhibitor, caspase inhibitor, granzyme inhibitor, cell adhesion inhibitor, cell division inhibitor, cell cycle inhibitor, lipid signaling inhibitor, protease inhibitor, reducing agent, alkylating agent, antimicrobial agent, oxidase inhibitor, or other inhibitor.

[0274] In some cases, a pharmaceutical formulation can comprise a binder as an excipient. Non-limiting examples of suitable binders can include starches, pregelatinized starches, gelatin, polyvinylpyrolidone, cellulose, methylcellulose, sodium carboxymethylcellulose, ethylcellulose, polyacrylamides, polyvinyloxoazolidone, polyvinylalcohols, C12-C18 fatty acid alcohol, polyethylene glycol, polyols, saccharides, oligosaccharides, and combinations thereof.

[0275] The binders that can be used in a pharmaceutical formulation can be selected from starches such as potato starch, corn starch, wheat starch; sugars such as sucrose, glucose, dextrose, lactose, maltodextrin; natural and synthetic gums; gelatin; cellulose derivatives such as microcrystalline cellulose, hydroxypropyl cellulose, hydroxyethyl cellulose, hydroxypropyl methyl cellulose, carboxymethyl cellulose, methyl cellulose, ethyl cellulose; polyvinylpyrrolidone (povidone); polyethylene glycol (PEG); waxes; calcium carbonate; calcium phosphate; alcohols such as sorbitol, xylitol, mannitol and water or a combination thereof.

[0276] In some cases, a pharmaceutical formulation can comprise a lubricant as an excipient. Non-limiting examples of suitable lubricants can include magnesium stearate, calcium stearate, zinc stearate, hydrogenated vegetable oils, sterotex, polyoxyethylene monostearate, talc, polyethyleneglycol, sodium benzoate, sodium lauryl sulfate, magnesium lauryl sulfate, and light mineral oil. The lubricants that can be used in a pharmaceutical formulation can be selected from metallic stearates (such as magnesium stearate, calcium stearate, aluminum stearate), fatty acid esters (such as sodium stearyl fumarate), fatty acids (such as stearic acid), fatty alcohols, glyceryl behenate, mineral oil, paraffins, hydrogenated vegetable oils, leucine, polyethylene glycols (PEG), metallic lauryl sulphates (such as sodium lauryl sulphate, magnesium lauryl sulphate), sodium chloride, sodium benzoate, sodium acetate and talc or a combination thereof.

[0277] In some cases, a pharmaceutical formulation can comprise a dispersion enhancer as an excipient. Non-limiting examples of suitable dispersants can include starch, alginic acid, polyvinylpyrrolidones, guar gum, kaolin, bentonite, purified wood cellulose, sodium starch glycolate, isomorphous silicate, and microcrystalline cellulose as high HLB emulsifier surfactants.

[0278] In some cases, a pharmaceutical formulation can comprise a disintegrant as an excipient. In some cases, a disintegrant can be a non-effervescent disintegrant. Non-limiting examples of suitable non-effervescent disintegrants can include starches such as corn starch, potato starch, pregelatinized and modified starches thereof, sweeteners, clays, such as bentonite, micro-crystalline cellulose, alginates, sodium starch glycolate, gums such as agar, guar, locust bean, karaya, pectin, and tragacanth. In some cases, a disintegrant can be an effervescent disintegrant. Non-limiting examples of suitable effervescent disintegrants can include sodium bicarbonate in combination with citric acid, and sodium bicarbonate in combination with tartaric acid.

[0279] In some cases, an excipient can comprise a flavoring agent. Flavoring agents incorporated into an outer layer can be chosen from synthetic flavor oils and flavoring aromatics; natural oils; extracts from plants, leaves, flowers, and fruits; and combinations thereof. In some cases, a flavoring agent can be selected from the group consisting of cinnamon oils; oil of wintergreen; peppermint oils; clover oil; hay oil; anise oil; eucalyptus; vanilla; citrus oil such as lemon oil, orange oil, grape and grapefruit oil; and fruit essences including apple, peach, pear, strawberry, raspberry, cherry, plum, pineapple, and apricot.

[0280] In some cases, an excipient can comprise a sweetener. Non-limiting examples of suitable sweeteners can include glucose (corn syrup), dextrose, invert sugar, fructose, and mixtures thereof (when not used as a carrier); saccharin and its various salts such as a sodium salt; dipeptide sweeteners such as aspartame; dihydrochalcone compounds, glycyrrhizin; Stevia Rebaudiana (Stevioside); chloro derivatives of sucrose such as sucralose; and sugar alcohols such as sorbitol, mannitol, sylitol, and the like.

[0281] A composition may comprise a combination of the active agent, e.g., a ribozyme-activated RNA construct of the disclosure, a compound or composition, and a naturally-occurring or non-naturally-occurring carrier, inert (for example, a detectable agent or label) or active, such as an adjuvant, diluent, binder, stabilizer, buffers, salts, lipophilic solvents, preservative, adjuvant or the like and include pharmaceutically acceptable carriers. Carriers also include pharmaceutical excipients and additives proteins, peptides, amino acids, lipids, and carbohydrates (e.g., sugars, including monosaccharides, di-, tri-, tetra-oligosaccharides, and oligosaccharides; derivatized sugars such as alditols, aldolic acids, esterified sugars and the like; and polysaccharides or sugar polymers), which can be present singly or in combination, comprising alone or in combination 1-99.99% by weight or volume. Exemplary protein excipients include serum albumin such as human serum albumin (HSA), recombinant human albumin (rHA), gelatin, casein, and the like. Representative amino acid/antibody components, which can also function in a buffering capacity, include alanine, arginine, glycine, arginine, betaine, histidine, glutamic acid, aspartic acid, cysteine, lysine, leucine, isoleucine, valine, methionine, phenylalanine, aspartame, and the like. Carbohydrate excipients are also intended within the scope of this technology, examples of which include but are not limited to monosaccharides such as fructose, maltose, galactose, glucose, D-mannose, sorbose, and the like; disaccharides, such as lactose, sucrose, trehalose, cellobiose, and the like; polysaccharides, such as raffinose, melezitose, maltodextrins, dextrans, starches, and the like; and alditols, such as mannitol, xylitol, maltitol, lactitol, xylitol sorbitol (glucitol) and myoinositol.

[0282] In the instance where the ribozyme-activated RNA construct, linear icRNA or circular icRNA are present in an RNA form (vs. a DNA encoding such construct), the preparation may include suitable RNAse inhibitors. Such RNAse inhibitors can prevent degradation of the constructs prior to use.

[0283] In some embodiments, a pharmaceutical composition can be formulated in milligrams (mg), milligram per kilogram (mg/kg), copy number, or number of molecules. In some cases, a composition can comprise about 0.01 mg to about 2000 mg of the active agent. In some cases, a composition can comprise about: 0.01 mg, 0.1 mg, 1 mg, 10 mg, 100 mg, 500 mg, 1000 mg, 1500 mg, or about 2000 mg of the active agent.

[0284] The terms “subject,” “host,” “individual,” and “patient” may be used interchangeably herein to refer to any organism eukaryotic or prokaryotic. In some cases, “subject” may refer to an animal, such as a mammal. A mammal can be administered a ribozyme-activated RNA construct of the disclosure or composition as described herein. Non-limiting examples of mammals include humans, non-human primates (e.g., apes, gibbons, chimpanzees, orangutans, monkeys, macaques, and the like), domestic animals (e.g., dogs and cats), farm animals (e.g., horses, cows, goats, sheep, pigs) and experimental animals (e.g., mouse, rat, rabbit, guinea pig). In some embodiments a mammal is a human. A mammal can be any age or at any stage of development (e.g., an adult, teen, child, infant, or a mammal in utero). A mammal can be male or female. A mammal can be a pregnant female. In some embodiments a subject is a human. In some embodiments, a subject has or is suspected of having a cancer or neoplastic disorder. In other embodiments, a subject has or is suspected of having a disease or disorder associated with aberrant protein expression or protein activity. In some cases, a human can be more than about: 1 day to about 10 months old, from about 9 months to about 24 months old, from about 1 year to about 8 years old, from about 5 years to about 25 years old, from about 20 years to about 50 years old, from about 1 year old to about 130 years old or from about 30 years to about 100 years old. Humans can be more than about: 1, 2, 5, 10, 20, 30, 40, 50, 60, 70, 80, 90, 100, 110, or 120 years of age. Humans can be less than about: 1, 2, 5, 10, 20, 30, 40, 50, 60, 70, 80, 90, 100, 110, 120 or 130 years of age.

[0285] In some embodiments, a method of treating a human in need thereof can comprise administering to the human a ribozyme-activated RNA construct of the disclosure. In some embodiments, compositions herein can be used to treat disease and conditions. A disease or condition can comprise a neurodegenerative disease, a muscular disorder, a metabolic disorder, an ocular disorder, or any combination thereof. The disease or condition can comprise cystic fibrosis, albinism, alpha-1-antitrypsin deficiency, Alzheimer disease, Amyotrophic lateral sclerosis (ALS), Asthma, β-thalassemia, Cadasil syndrome, Charcot-Marie-Tooth disease, Chronic Obstructive Pulmonary Disease (COPD), Distal Spinal Muscular Atrophy (DSMA), Duchenne/Becker muscular dystrophy, Dystrophic Epidermolysis bullosa, Epidermylosis bullosa, Fabry disease, Factor V Leiden associated disorders, Familial Adenomatous, Polyposis, Galactosemia, Gaucher's Disease, Glucose-6-phosphate dehydrogenase, Haemophilia, Hereditary Hematochromatosis, Hunter Syndrome, Huntington's disease, Hurler Syndrome, Inflammatory Bowel Disease (IBD), Inherited polyagglutination syndrome, Leber congenital amaurosis, Lesch-Nyhan syndrome, Lynch syndrome, Marfan syndrome, Mucopolysaccharidosis, Muscular Dystrophy, Myotonic dystrophy types I and II, neurofibromatosis, Niemann-Pick disease type A, B and C, NY-esol related cancer, Parkinson's disease, Peutz-Jeghers Syndrome, Phenylketonuria, Pompe's disease, Primary Ciliary Disease, Prothrombin mutation related disorders, such as the Prothrombin G20210A mutation, Pulmonary Hypertension, Retinitis Pigmentosa, Sandhoff Disease, Severe Combined Immune Deficiency Syndrome (SCID), Sickle Cell Anemia, Spinal Muscular Atrophy, Stargardt's Disease, Tay-Sachs Disease, Usher syndrome, X-linked immunodeficiency, various forms of cancer (e.g. BRCA1 and 2 linked breast cancer and ovarian cancer). In some cases, a disease or condition can comprise Mucopoysaccharidosis type I (MPSI). In some cases, the MPSI can comprise Hurler syndrome, Hurler-Scheie syndrome, Scheie syndrome, or any combination thereof. The disease or condition can comprise a muscular dystrophy, an omithine transcarbamylase deficiency, a retinitis pigmentosa, a breast cancer, an ovarian cancer, Alzheimer's disease, pain, Stargardt macular dystrophy, Charcot-Marie-Tooth disease, Rett syndrome, or any combination thereof.

[0286] In some embodiments, naked RNA constructs can be delivered to cells or subjects. In other embodiments, a vector can be employed to deliver a ribozyme-activated RNA construct of the disclosure. A vector can comprise DNA, such as double stranded DNA or single stranded DNA. A vector can comprise RNA. In some cases, the RNA can comprise one or more base modifications. The vector can comprise a recombinant vector. In some cases, the vector can be a vector that is modified from a naturally occurring vector. The vector can comprise at least a portion of a non-naturally occurring vector. Any vector can be utilized. In some cases, the vector can comprise a viral vector, a liposome, a nanoparticle, an exosome, an extracellular vesicle, or any combination thereof. In some embodiments, plasmid vectors can be prepared from commercially available vectors. In other embodiments, viral vectors can be produced from baculoviruses, retroviruses, adenoviruses, AAVs, or a combination thereof. Examples of viral vectors include retroviral vectors, adenovirus vectors, adeno-associated virus vectors, alphavirus vectors and the like. In one embodiment, the viral vector is a lentiviral vector. Infectious tobacco mosaic virus (TMV)-based vectors can be used to manufacturer constructs (e.g., icRNAs) in tobacco leaves. Alphavirus vectors, such as Semliki Forest virus-based vectors and Sindbis virus-based vectors, have also been developed for use in gene therapy and immunotherapy. Such vectors can remain episomally. In aspects where gene transfer is mediated by a retroviral vector, a vector construct can refer to the polynucleotide comprising the retroviral genome or part thereof, and a gene of interest. In some cases, a vector can contain both a promoter and a cloning site into which a polynucleotide (e.g., a ribozyme-activated RNA construct) can be operatively linked. Such vectors are capable of transcribing RNA in vitro or in vivo and are commercially available. In some cases, a viral vector can comprise an adenoviral vector, an adeno-associated viral vector (AAV), a lentiviral vector, a retroviral vector, a portion of any of these, or any combination thereof. In some cases, a nanoparticle vector can comprise a polymeric-based nanoparticle, an aminolipid based nanoparticle, a metallic nanoparticle (such as gold-based nanoparticle), a portion of any of these, or any combination thereof. In some cases, a vector can comprise an AAV vector. A vector can be modified to include a modified VP1 protein (such as an AAV vector modified to include a VP1 protein). An AAV can comprise a serotype—such as an AAV1 serotype, an AAV2 serotype, AAV3 serotype, an AAV4 serotype, AAV5 serotype, an AAV6 serotype, AAV7 serotype, an AAV8 serotype, an AAV9 serotype, an AAV10 serotype, an AAV11 serotype, a derivative of any of these, or any combination thereof.

[0287] In some embodiments, a vector can comprise a nucleic acid that encodes a linear precursor of a ribozyme-activated RNA construct of the disclosure. In some embodiments, a nucleic acid can comprise a linear precursor of a ribozyme-activated RNA construct of the disclosure. In some cases, the nucleic acid can be double stranded. In some instances, the nucleic acid can be DNA or RNA. In some cases, a nucleic acid can comprise more than one copy of a ribozyme-activated RNA construct of the disclosure. For example, a nucleic acid can comprise 2, 3, 4, 5, or more copies of a ribozyme-activated RNA construct of the disclosure. In some instances, the nucleic acid can comprise a U6 promoter, a CMV promotor or any combination thereof.

[0288] Certain vectors are capable of autonomous replication in a host cell into which they are introduced (e.g., bacterial vectors having a bacterial origin of replication and episomal mammalian vectors). Other vectors (e.g., non-episomal mammalian vectors) are integrated into the genome of a host cell upon introduction into the host cell, and thereby are replicated along with the host genome. Moreover, certain vectors are capable of directing the expression of genes to which they are operatively linked. Such vectors are referred to herein as “expression vectors.” In general, expression vectors of utility in recombinant DNA techniques are often in the form of plasmids. In the present specification, “plasmid” and ‘Vector” can be used interchangeably. However, the disclosure is intended to include such other forms of expression vectors, such as viral vectors (e.g., replication defective retroviruses, adenoviruses and adeno-associated viruses), which serve equivalent functions. Typically, the vector or plasmid contains sequences directing transcription and translation of a relevant gene or genes, a selectable marker, and sequences allowing autonomous replication or chromosomal integration. Suitable vectors comprise a region 5′ of the gene which harbors transcriptional initiation controls and a region 3′ of the DNA fragment which controls transcription termination. Both control regions may be derived from genes homologous to the transformed host cell, although it is to be understood that such control regions may also be derived from genes that are not native to the species chosen as a production host.

[0289] Typically, the vector or plasmid contains sequences directing transcription and translation of a gene fragment, a selectable marker, and sequences allowing autonomous replication or chromosomal integration. Suitable vectors comprise a region 5′ of the gene which harbors transcriptional initiation controls and a region 3′ of the DNA fragment which controls transcription termination. Both control regions may be derived from genes homologous to the transformed host cell, although it is to be understood that such control regions may also be derived from genes that are not native to the species chosen as a production host.

[0290] Initiation control regions or promoters, which are useful to drive expression of the relevant coding regions in the desired host cell are numerous and familiar to those skilled in the art. Virtually any promoter capable of driving these genetic elements is suitable for use in the disclosure. For example, a pol III promoter, a U6 promoter, a CMV promoter, a T7 promoter, an H1 promoter, can be used to drive expression. Termination control regions may also be derived from various genes native to the preferred hosts.

[0291] Administration of a ribozyme-activated RNA construct of the disclosure can be effected in one dose, continuously or intermittently throughout the course of treatment. Methods of determining the most effective means and dosage of administration can vary with the composition used for therapy, the purpose of the therapy, the target cell being treated, and the subject being treated. Single or multiple administrations can be carried out with the dose level and pattern being selected by the treating physician. Suitable dosage formulations and methods of administering the agents can vary and depend on the disease or condition. Routes of administration can vary with the composition used for treatment, the purpose of the treatment, the health condition or disease stage of the subject being treated, and target cell or tissue. Non-limiting examples of routes of administration include oral administration, nasal administration, injection, and topical application.

[0292] Administration can refer to methods that can be used to enable delivery of compounds or compositions to the desired site of biological action (such as DNA constructs, viral vectors, or others). These methods can include topical administration (such as a lotion, a cream, an ointment) to an external surface of a surface, such as a skin. These methods can include parenteral administration (including intravenous, subcutaneous, intrathecal, intraperitoneal, intramuscular, intravascular or infusion), oral administration, inhalation administration, intraduodenal administration, and rectal administration. In some instances, a subject can administer the composition in the absence of supervision. In some instances, a subject can administer the composition under the supervision of a medical professional (e.g., a physician, nurse, physician's assistant, orderly, hospice worker, etc.). In some cases, a medical professional can administer the composition. In some cases, a cosmetic professional can administer the composition.

[0293] Administration or application of a composition disclosed herein can be performed for a treatment duration of at least about 1, 2, 3, 4, 5, 6, 7, 8, 9, 10, 11, 12, 13, 14, 15, 16, 17, 18, 19, 20, 21, 22, 23, 24, 25, 26, 27, 28, 29, 30, 31, 32, 33, 34, 35, 36, 37, 38, 39, 40, 41, 42, 43, 44, 45, 46, 47, 48, 49, 50, 51, 52, 53, 54, 55, 56, 57, 58, 59, 60, 61, 62, 63, 64, 65, 66, 67, 68, 69, 70, 71, 72, 73, 74, 75, 76, 77, 78, 79, 80, 81, 82, 83, 84, 85, 86, 87, 88, 89, 90, 91, 92, 93, 94, 95, 96, 97, 98, 99, or 100 days consecutive or nonconsecutive days. In some cases, a treatment duration can be from about 1 to about 30 days, from about 2 to about 30 days, from about 3 to about 30 days, from about 4 to about 30 days, from about 5 to about 30 days, from about 6 to about 30 days, from about 7 to about 30 days, from about 8 to about 30 days, from about 9 to about 30 days, from about 10 to about 30 days, from about 11 to about 30 days, from about 12 to about 30 days, from about 13 to about 30 days, from about 14 to about 30 days, from about 15 to about 30 days, from about 16 to about 30 days, from about 17 to about 30 days, from about 18 to about 30 days, from about 19 to about 30 days, from about 20 to about 30 days, from about 21 to about 30 days, from about 22 to about 30 days, from about 23 to about 30 days, from about 24 to about 30 days, from about 25 to about 30 days, from about 26 to about 30 days, from about 27 to about 30 days, from about 28 to about 30 days, or from about 29 to about 30 days.

[0294] Administration or application of compositions disclosed herein can be performed at least 1, 2, 3, 4, 5, 6, 7, 8, 9, 10, 11, 12, 13, 14, 15, 16, 17, 18, 19, 20, 21, 22, 23, or 24 times a day. In some cases, administration or application of composition disclosed herein can be performed at least 1, 2, 3, 4, 5, 6, 7, 8, 9, 10, 11, 12, 13, 14, 15, 16, 17, 18, 19, 20, or 21 times a week. In some cases, administration or application of composition disclosed herein can be performed at least 1, 2, 3, 4, 5, 6, 7, 8, 9, 10, 11, 12, 13, 14, 15, 16, 17, 18, 19, 20, 21, 22, 23, 24, 25, 26, 27, 28, 29, 30, 31, 32, 33, 34, 35, 36, 37, 38, 39, 40, 41, 42, 43, 44, 45, 46, 47, 48, 49, 50, 51, 52, 53, 54, 55, 56, 57, 58, 59, 60, 61, 62, 63, 64, 65, 66, 67, 68, 69, 70, 71, 72, 73, 74, 75, 76, 77, 78, 79, 80, 81, 82, 83, 84, 85, 86, 87, 88, 89, or 90 times a month.

[0295] In some cases, a composition can be administered or applied as a single dose or as divided doses. In some cases, the compositions described herein can be administered at a first time point and a second time point. In some cases, a composition can be administered such that a first administration is administered before the other with a difference in administration time of 1 hour, 2 hours, 4 hours, 8 hours, 12 hours, 16 hours, 20 hours, 1 day, 2 days, 4 days, 7 days, 2 weeks, 4 weeks, 2 months, 3 months, 4 months, 5 months, 6 months, 7 months, 8 months, 9 months, 10 months, 11 months, 1 year or more.

### Kits

[0296] Kits and articles of manufacture are also described herein that contain ribozyme-mediated RNA-constructs. Such kits can comprise a carrier, package, or container that is compartmentalized to receive one or more containers such as vials, tubes, and the like, each of the container(s) comprising one of the separate elements to be used in a method described herein. Suitable containers include, for example, bottles, vials, syringes, and test tubes. The containers can be formed from a variety of materials such as glass or plastic.

[0297] For example, the container(s) can comprise one or more RNA fusion constructs described herein, optionally in a composition or in combination with another agent as disclosed herein. The container(s) optionally have a sterile access port (for example the container can be an intravenous solution bag or a vial having a stopper pierceable by a hypodermic injection needle). Such kits optionally comprise a compound disclosed herein with an identifying description or label or instructions relating to its use in the methods described herein.

[0298] A kit will typically comprise one or more additional containers, each with one or more of various materials (such as reagents, optionally in concentrated form, and/or devices) desirable from a commercial and user standpoint for use of a compound described herein. Non-limiting examples of such materials include, but are not limited to, buffers, diluents, filters, needles, syringes; carrier, package, container, vial and/or tube labels listing contents and/or instructions for use, and package inserts with instructions for use. A set of instructions will also typically be included.

[0299] A label can be on or associated with the container. A label can be on a container when letters, numbers or other characters forming the label are attached, molded or etched into the container itself; a label can be associated with a container when it is present within a receptacle or carrier that also holds the container, e.g., as a package insert. A label can be used to indicate that the contents are to be used for a specific therapeutic application. The label can also indicate directions for use of the contents, such as in the methods described herein. These other therapeutic agents may be used, for example, in the amounts indicated in the Physicians' Desk Reference (PDR) or as otherwise determined by one of ordinary skill in the art.

[0300] The following examples are intended to illustrate but not limit the disclosure. While they are typical of those that might be used, other procedures known to those skilled in the art may alternatively be used.

### EXAMPLES

### Example 1: Extensive In Vivo and In Vivo Protein Translation Via In Situ Circularized RNAs

[0301] Cell culture: HEK293T and HeLa cells were cultured in DMEM supplemented with 10% FBS and 1% Antibiotic-Antimycotic (Thermo Fisher). K562 cells were cultured in RPMI supplemented with 10% FBS and 1% Antibiotic-Antimycotic (Thermo Fisher). All cells were cultured in an incubator at 37° C. and 5% CO₂.

[0302] DNA transfections were performed by seeding HEK293T cells in 12 well plates at 25% confluency and adding 1 μg of each DNA construct and 4 μL of Lipofectamine 2000 (Thermo Fisher). RNA transfections were performed by adding 1 μg of each RNA construct and 3.5 μL of Lipofectamine MessengerMax (ThermoFisher). Electroporations were performed in K562 cells using the SF Cell Line 4D-Nucleofector X Kit S (Lonza) per manufacturer's protocol.

[0303] In vitro transcription: DNA templates for generating desired RNA products were created by PCR amplification from plasmids or gBlock gene fragments (IDT) and purified using a PCR purification kit (Qiagen). Plasmids were then generated with these templates containing a T7 promoter followed by 5′ ribozyme sequence, a 5′ ligation sequence, an IRES sequence linked to the product of interest, a 3′ ligation sequence, a 3′ ribozyme sequence, and lastly a poly-T tail to terminate transcription. Linear RNA products were then produced using the HiScribe T7 Quick High Yield RNA Synthesis Kit (NEB) per manufacturer's protocol.

[0304] Flow cytometry experiments: To assess persistence of RNA constructs in vitro, HEK293T cells were transfected with circular or mutated GFP RNA and GFP intensity, defined as the median intensity of the cell population, was quantified over the next three days using a BD LSRFortessa Cell Analyzer.

[0305] Lipid nanoparticle formulations: (6Z,9Z,28Z,31Z)-heptatriaconta-6,9,28,31-tetraen-19-yl-4-(dimethylamino) butanoate (DLin-MC3-DMA) was purchased from BioFine International Inc. 1,2-distearoyl-sn-glycero-3-phosphocholine (DSPC) and 1,2-dimyristoyl-rac-glycero-3-methoxypolyethylene glycol-2000 (DMG-PEG-2000) were purchased from Avanti Polar Lipids. Cholesterol was purchased from Sigma-Aldrich. mRNA LNPs were formulated with DLin-MC3-DMA:cholesterol:DSPC:DMG-PEG at a mole ratio of 50:38.5:10:1.5 and a N/P ratio of 5.4. To prepare LNPs, lipids in ethanol and mRNA in 25 mM acetate buffer, pH 4.0 were combined at a flow rate of 1:3 in a PDMS staggered herringbone mixer (PMID: 23344179, 22475086). The dimensions of the mixer channels were 200 by 100 um, with herringbone structures 30 um high and 50 um wide. Immediately after formulation, 3-fold volume of PBS was added and LNPs were purified in 100 kDa MWCO centrifugal filters by exchanging the volume 3 times. Final formulations were passed through a 0.2 um filter. LNPs were stored at 4° C. for up to 4 days before use. LNP hydrodynamic diameter and polydispersity index were measured by dynamic light scattering (Malvern NanoZS Zetasizer). The mRNA content and percent encapsulation were measured with a Quant-it RiboGreen RNA Assay (Invitrogen) with and without Triton X-100 according to the manufacturer's protocol.

[0306] Animal experiments: All animal procedures were performed in accordance with protocols approved by the Institutional Animal Care and Use Committee of the University of California, San Diego. All mice were acquired from Jackson Labs.

[0307] To assess persistence of RNA constructs in vivo, 10 μg of circular GFP or mutated GFP mRNA-LNPs were injected retro-orbitally into C57BL/6J mice. After 3 days and 7 days, livers were isolated and placed in RNAlater (Sigma-Aldrich). RNA was later isolated using QIAzol Lysis Reagent and purified using RNeasy Mini Kit (Qiagen) according to the manufacturer's protocol. mRNA expression of circular RNA and GFP was assessed by RT-qPCR.

[0308] To investigate the ability of circular and mutated COVID RNA to elicit an immune response, Balb/c mice were injected intramuscularly into the gastrocnemius muscle with PBS, 0.2 μg of mutated or circular mRNA-LNPs, or 2 μg of mutated or circular mRNA-LNPs. Blood draws were performed on days 0, 9, and 21, serum was separated using blood collection tubes (Sarstedt), and antibody production was then assessed by a sandwich enzyme-linked immunosorbent assay (ELISA). ELISA was performed using the ELISA Starter Accessory Kit (Bethyl, E101) per manufacturer's instructions. Briefly, 96-well MaxiSorp well plates were coated with recombinant SARS-COV-2 Spike protein 51, Omicron variant (GenScript Biotech) diluted in 1× coating buffer (Bethyl) to a concentration of 2 μg/mL overnight at 4 C. Plates were washed five times with 1× washing buffer (Bethyl), followed by the addition of 1× blocking buffer for 1 hour at RT. Samples were diluted 1:10 in sample/conjugate diluent (Bethyl) and added to the plate for 2 hours at RT. Sample/conjugate diluent was used as a blank. Plates were washed five times with 1× washing buffer and incubated in secondary antibody (horseradish peroxidase (HRP)-conjugated goat anti-mouse IgG antibody, Southern Biotech 1036-05, diluted 1:5000 in sample/conjugate diluent) for 1 hour at RT. After five washes, 50 μL/well TMB One Component HRP Microwell Substrate (Bethyl) was added and incubated for 15 min at RT in the dark. 50 μL/well of 0.2M H₂SO₄ was then added to terminate color development and absorbance was measured at 450 nm in a SpectraMax iD5 Multi-Mode Microplate Reader (Molecular Devices).

[0309] Identification of SpCas9 MHC binding epitopes: Two approaches were used to identify MHC binding epitopes. First, large amounts of available sequencing data were analyzed to identify low-frequency single nucleotide polymorphism, which represent mutational changes that are unlikely to induce non-functional variants. Secondly, potential mutations were screened in silico using the netMHC epitope prediction software. Using these strategies, 23 different mutations across 17 immunogenic epitopes were identified.

[0310] Identification of HPRT1 Guide: The lentiCRISPR-v2 plasmid (Addgene #52961) was first digested with Esp3I and a guide targeting the HPRT1 gene was cloned in via Gibson assembly. After lentivirus production, HeLa cells were seeded at 25% confluency in 96 well plates and transduced with virus (lentiCRISPR-v2 with or without HPRT1 guide) and 8 μg/mL polybrene (Millipore). Virus was removed the next day and 2.5 μg/mL puromycin was added to remove cells that did not receive virus two days later. After 2 days of puromycin selection, 0-14 μg/mL 6-TG was added. After 5 days, cells were stained with crystal violet, solubilized using 1% sodium dodecyl sulfate, and absorbance was measured at 595 nm on a plate reader. 6 μg/mL was chosen due to the lack of cells in the negative control.

[0311] Generation of variant Cas9 library: Cas9 variant sequences were generated by separating the full-length gene sequence into small sections, where each section contained wildtype or variant Cas9 sequences. gBlocks were PCR amplified and blocks annealed together, yielding a final library size of about 1.5 million elements. The lentiCRISPR-v2 plasmid containing the HPRT1 guide was digested with BamHI and XbaI and Gibson assembly was used to clone elements into the vector. The Gibson reactions were then transformed into electrocompetent cells and cultured at 37C overnight. Plasmid DNA was isolated using the Qiagen Plasmid Maxi Kit and library coverage was estimated by calculating the number of colonies found on LB-carbencillin plates. DNA was then used to create lentivirus containing the variant Cas9 library.

[0312] Cas9 Sreen: HeLa cells were seeded in 15 15-cm plates and transduced with virus containing the variant Cas9 library and 8 μg/mL polybrene. Media was changed the next day and 2.5 μg/mL puromycin was added to remove cells that did not receive virus two days later. 6 μg/mL 6-TG was added to media once cells reached 90% confluency. Media was changed every other day for ten days to allow for selection of cells containing functional Cas9 variants. After ten days, cells were lifted from the plates and DNA was isolated using the DNeasy Blood & Tissue Kit per manufacturer's protocol.

[0313] Nanopore Sequencing: Pre-screen analysis of the Cas9 variant library elements was performed by amplifying the sequence from the plasmid. 1 μg of the variant Cas sequences was used for library preparation using the Ligation Sequencing Kit (Oxford Nanopore Technologies, SQK-LSK109) per manufacturer's instructions. DNA was then loaded into a MinION flow cell (Oxford Nanopore Technologies, R9.4.1). Post-screen analysis of library elements was performed by amplifying the Cas9 sequences from 75 μg of genomic DNA. 1 μg of the variant Cas sequences was similarly prepared using the Ligation Sequencing Kit and sequenced on a MinION flow cell.

[0314] HDR validation: Lentivirus was produced from a plasmid containing a GFP sequence with a stop codon and 68 bp AAVS1 fragment and used to transduce HEK293T cells. After puromycin selection to create a stable line, cells were transduced with lentiCRISPR-v2 plasmids containing both variant Cas9 sequences and a guide targeting the AAVS locus and a GFP repair donor plasmid or separate plasmids containing Cas9 variant in a pZac 2.1 backbone, AAVS1 guide, and the GFP repair donor plasmid. After 3 days, FACS was performed and percent GFP positive was quantified.

[0315] Editing experiments: To validate variant Cas9 functional cutting, variant Cas9 and guides were transfected into HEK293T cells. After two days, genomic DNA was isolated. Genomic DNA was also isolated after two days from K562 cells after electroporation. To assess mutated and circular zinc finger and Cas activity, HEK293T cells were transfected with RNA and guide RNA, in the case of Cas, and genomic DNA was isolated after three days.

[0316] Epigenome experiments: dCas9 and CRISPRoff experiments were performed by transfecting HEK293T cells with DNA or RNA and isolating RNA three days later. Silencing or activation of genes was assessed by qPCR.

[0317] Quantification of editing using NGS: After extraction of genomic DNA, PCR was performed to amplify the target site. Amplicons were then indexed using the NEBNext Multiplex Oligos for Illumina kit (NEB). Amplicons were then pooled and sequenced using a Miseq Nano with paired end 150 bp reads. Editing efficiency was quantified using CRISPResso2.

[0318] Lentivirus production: HEK293FT cells were seeded in 1 15-cm plate and transfected with 36 μL Lipofectamine 2000, 3 μg pMD2.G (Addgene #12259), 12 μg pCMV delta R8.2 (Addgene #12263), and 9 μg of the lentiCRISPR-v2 plasmid. Supernatant containing viral particles was harvested after 48 and 72 hours, filtered with 0.45 μm Steriflip filters (Millipore), concentrated to a final volume of 1 mL using an Amicon Ultra-15 centrifugal filter unit with a 100,000 NMWL cutoff (Millipore), and frozen at −80 C.

[0319] RT-qPCR: cDNA was synthesized from RNA using the Protoscript II First Strand cDNA Synthesis Kit (NEB). qPCR was performed using a CFX Connect Real Time PCR Detection System (Bio-Rad). All samples were run in triplicates and results were normalized against GAPDH expression.

[0320] To engineer icRNAs, in vitro transcribed linear RNAs were generated that bear a twister ribozyme (also referred to as linearized ribozyme-RNAs) flanked internal ribosome entry site (IRES) coupled to a messenger RNA of interest (FIG. 1A). Once transcribed, the flanking twister ribozymes rapidly self-cleave, enabling hybridization of the complementary ligation stems to one another, and upon delivery into cells, these linear RNAs (also referred to herein as linear icRNAs) are then circularized in situ by the ubiquitous RNA ligase RtcB. To evaluate this approach, green fluorescent protein (GFP) translation was assayed via flow cytometry in the icRNA format in vitro in HEK293T cells. Towards this, a panel of IRES sequences, ligation stems, and 3′ untranslated regions (UTRs) (sequences shown in FIGS. 17A, 17B, and 17C) were screened to optimize protein translation (FIG. 3A). Next, studies were performed to investigate whether linear icRNAs were covalently circularized in cells upon delivery via RT-PCR by designing outward facing primers that selectively amplified only the circularized RNA molecules. As a negative control, linear in situ circularization defective RNAs (icdRNAs) were engineered by utilizing catalytically inactive mutants of the twister ribozymes. Indeed, only a PCR product for linear icRNAs was observed, confirming circularization to produce corresponding circular icRNAs (FIG. 1C). icRNA mRNA expression appeared to be quite consistent, reducing each day at roughly the rate of cell division (FIG. 3C). To investigate persistence of GFP expression over time, HEK293T cells were transfected with equal amounts of linear-GFP icRNA (linear GFP icRNA delivered into the cells and then circularized in the cell to produce circular GFP icRNAs) and linear-GFP icdRNA and performed FACS over three days. The former resulted in significantly robust and durable protein translation over time (FIG. 1B). Furthermore, persistence of circular-GFP icRNA (generated from the introduced linear GFP icRNAs) is significantly higher than commercial products (FIG. 3C). Ibis result was also validated via RT-PCR, as an increased persistence of GFP mRNA over time from cells transfected with linear icRNA compared to icdRNA was observed (FIG. 1B). To assess the durability of linear icRNA and corresponding circular icRNA in vivo, linear GFP icRNA and GFP icdRNA were encapsulated in lipid nanoparticles (LNPs) (FIG. 3A) and 10 μg were retro-orbitally injected into C57BL/6 mice. Persistence of circular GFP mRNA was observed in mice livers injected with linear icRNA encapsulated LNPs for at least seven days (FIG. 3A).

[0321] Studies were then performed to explore icRNA application in two distinct therapeutic transgene delivery contexts: one, to enable immunization via proteins delivered in the linear icRNA format, and two, to enable genome targeting via delivery of proteins. Towards the former, the production of IgG binding antibodies against SARS-CoV-2 Omicron variant spike protein was assessed in BALB/c mice via ELISA. Linear icRNAs and icdRNAs bearing the Omicron spike (K986P, V987P) protein were generated, encapsulated in LNPs, and delivered via a single intramuscular injection at doses of 0.2 μg linear icRNA or icdRNA/mouse and 2 μg icRNA or icdRNA/mouse. Robust induction of anti-spike IgG in the sera of animals receiving 2 μg linear icRNA at 3 weeks post injection compared to other groups (FIG. 1D) was confirmed. Towards the latter, linear zinc finger nuclease (ZFN) icRNAs and icdRNAs targeting the GFP and CCR5 genes were engineered, and again confirmed robust genome editing via icRNAs compared to icdRNAs via their delivery into HEK293T cells (FIG. 1E).

[0322] Spurred by these results studies were performed to explore if icRNAs could be used to deliver the CRISPR-Cas9 systems. It was conjectured that the prolonged expression via icRNAs could facilitate genome and especially epigenome targeting. However, this same feature of persistence could also aggravate immune responses in therapeutic settings as CRISPR systems are derived from prokaryotes. Thus, to enable compatibility between persistence of expression and immunogenicity, a methodology was developed to screen progressively deimmunized SpCas9 proteins by combinatorially mutating particularly immunogenic epitopes.

[0323] While variant library screening has proven to be an effective approach to protein engineering, applying it to deimmunization faces several technical challenges, namely: one, the need to mutate multiple sites simultaneously across the full length of the protein; two, reading out the associated combinatorial mutations scattered across large (>1 kb) regions of the protein via typical short read sequencing platforms; and three, engineering fully degenerate combinatorial libraries which can very quickly balloon to unmanageable numbers of variants. To overcome these challenges several methodological innovations were developed which, taken together, comprise a novel long range multiplexed (LORAX) protein engineering platform capable of screening millions of combinatorial variants simultaneously with mutations spread across the full length of arbitrarily large proteins (FIG. 2a).

[0324] Towards library design, in order to narrow down the vast mutational space associated with combinatorial libraries, an approach guided by evolution and natural variation was used. As de-immunizing protein engineering seeks to alter the amino acid sequence of a protein without disrupting functionality, it is extremely useful to narrow down mutations to those less likely to result in non-functional variants. To identify these mutants large amounts of sequencing data that was available was used to identify low-frequency SNPs that have been observed in natural environments. Such variants are likely to have limited effect on protein function, as highly deleterious alleles would likely be quickly selected out of natural populations and therefore not appear in sequencing data. Additionally, resulting potential mutations were evaluated for immunogenicity in silico using the netMHC epitope prediction software, in order to determine to what degree the mutations are likely to result in the de-immunization of that particular epitope. This is a useful step as some mutations may have little effect on overall immunogenicity. Screening thus filtered likely neutral amino acid substitutions, in combinatorial libraries should thus substantially increase the likelihood of functional hits with enough epitope variation to evade immune induction.

[0325] Next, to enable readout of screens, long-read nanopore sequencing was applied to measure the results of the screens of our combinatorial libraries. This circumvents the limit of short target regions and obviates the need for barcodes altogether by single-molecule sequencing of the entire target gene, enabling library design strategies which can explore any region of the protein in combination with any other region without any complicated cloning procedures required to facilitate barcoding. To date, the adoption of nanopore sequencing has been limited by its high error rate, around 95% accuracy per DNA base, as compared to established short read techniques which are multiple orders of magnitude more accurate. To address this challenge, libraries were designed such that each variant that was engineered would have multiple nucleotide changes for each single target amino acid change, effectively increasing the sensitivity of nanopore based readouts with increasing numbers of nucleotide changes per library member. The large majority of amino acid substitutions are amenable to a library design paradigm in which each substitution is encoded by two, rather than one, nucleotide changes, due to the degeneracy of the genetic code and the highly permissive third “wobble” position of codons.

[0326] The scale of engineering which would be required to generate an effectively de-immunized Cas9 is not fully understood, as combinatorial de-immunization efforts at the scale of proteins thousands of amino acids long have not yet been possible. Therefore, to roughly estimate these parameters an immunogenicity scoring metric was developed, which takes into account all epitopes across a protein and the known diversity of MHC variants in a species weighted by population frequency to generate a single combined score representing the average immunogenicity of a full-length protein as a function of each of its immunogenic epitopes. Formally, this score is calculated as:

$${I}_{x} = \frac{{\sum }_{i}^{m} {\sum }_{j}^{n} {w}_{j} ( 1 - log ( {k}_{i j} * j ) )}{y}$$

[0327] where Iₓ=Immunogenicity score of protein x, i=epitopes, j=HLA alleles, j=allele specific standardization coefficient, wⱼ=HLA allele weights, kᵢⱼ=predicted binding affinity of epitope i to allele j, p=percentile rank of epitope i binding to allele j, and y=protein specific scaling factor. The overall effect of mutating the top epitopes in several Cas9 orthologs was then predicted (FIG. 4A). As might be expected, this analysis suggests that single-epitope strategies are woefully inadequate to de-immunize a whole protein, and also that there are diminishing returns as more and more epitopes are de-immunized. Our analysis suggests that it may require on the order of tens of de-immunized epitopes to make a significant impact on overall protein immunogenicity. The scale of engineering demanded by these immunological facts has previously been intractable, but by applying LORAX one could now make substantial steps, several mutations at a time, through the mutational landscape of the Cas9 protein.

[0328] Specifically, applying the procedure above, a library of Cas9 variants was designed based on the SpCas9 backbone containing 23 different mutations across 17 immunogenic epitopes (FIG. 2B). Combining these in all possible combinations yields a library of 1,492,992 unique elements. With this design, the library was constructed in a stepwise process. First, the full-length gene was broken up into short blocks of no more than 1000 bp, which overlap by 30 bp on each end. Each block is designed such that it contains no more than 3 or 4 target epitopes to mutagenize. With few epitopes per block and few variant mutations per epitope, it becomes feasible to chemically synthesize each combination of mutations for each block. Each of these combinations was then synthesized and mixed at equal ratios to make a degenerate block mix. This was repeated for each of the blocks necessary to complete the full-length protein sequence. Oxford Nanopore (ONT) MinION sequencing confirmed the majority of the pre-screened library consists of Cas9 sequences with significant numbers of mutations, with most falling into a broad peak between 6 and 14 mutations per sequence (FIG. 4C).

[0329] To identify functional variants still capable of editing DNA, a positive screen targeting the hypoxanthine phosphoribosyltransferase 1 (HPRT1) gene was designed and carried out. In the context of the screen, HPRT1 converts 6-thioguanine (6TG), an analogue of the DNA base guanine, into 6-thioguanine nucleotides that are cytotoxic to cells via incorporation into the DNA during S-phase. Thus, only cells containing functional Cas9 variants capable of disrupting the HPRT1 gene can survive in 6TG. To first identify the optimal 6TG concentration, HeLa cells were transduced with lentivirus particles containing wild-type Cas9 and either a HPRT1-targeting guide RNA (gRNA) or a non-targeting guide. After selection with puromycin, cells were treated with 6TG concentrations ranging from 0-14 μg/mL for one week. Cells were stained with crystal violet at the end of the experiment and imaged. 6 μg/mL was selected as all cells containing non-targeting guide had died while cells containing the HPRT1 guide remained viable (FIG. 4B).

[0330] To perform the screen, HeLa cells were transduced with lentiviral particles containing variant library along with the HPRT1-targeting gRNA at 0.3 MOI and at greater than 75-fold coverage of the library elements. Cells were selected using puromycin after two days and 6TG was added once cells reached 75% confluency. After two weeks, genomic DNA was extracted from remaining cells and full-length Cas9 sequences were PCR amplified. Nanopore-compatible sequencing libraries were prepared per manufacturer's instructions and sequenced on the MinION platform. This screening procedure was performed in two replicates.

[0331] Sequencing revealed that the library was significantly shifted in the mutation density distribution, suggesting that the majority of the library with large (>4) numbers of mutations resulted in non-functional proteins which were unable to survive the screen. Meanwhile, wild-type, single, and double mutants were generally enriched as these proteins proved more likely to retain functionality and pass through the screen (FIG. 4C). Additionally, the two independent replicates of the screen showed strong correlation (R²=0.925) providing further evidence of the robustness of the screen (FIG. 2C). In addition, the change in overall frequency of mutations in the pre- and post-screen libraries was analyzed to see if a pattern of mutation effects could be inferred. Although the wild-type allele was enriched at every site in the post-screen sequences, nearly every site retained a significant fraction of mutated alleles, suggesting that the mutations, at least individually, are fairly well-tolerated and do not disrupt Cas9 functionality (FIG. 4D).

[0332] In order to select hits from the screen for downstream validation and analysis, a method for differentiating high-support hits likely to be real from noise-driven false positive hits was devised. To do this it was hypothesized that the fitness landscape of the screen mutants is likely to be smooth, i.e. variants that contain similar mutations are more likely to have similar fitnesses in terms of editing efficiency compared to randomly selected pairs. This was confirmed by computing a predicted screen score for each variant based on a weighted regression of its nearest neighbors in the screen. This metric correlates well with the actual screen scores and approaches the screen scores even more closely as read coverage increases. This provides good evidence that the fitness landscape is indeed somewhat smooth (FIG. 5A). Next, a network analysis was performed to try to differentiate noise-driven hits from bona fide hits by looking at the degree of connectivity with other hits. The rationale here is that because the fitness landscape is smooth, real hits should reside in broad fitness peaks including many neighbors that also show high screen scores, whereas hits that are less supported by near neighbors are more likely to be spurious as they represent non-smooth fitness peaks (FIG. 2D).

[0333] To validate and characterize hits from the screen, 20 variants (V1-20) were constructed (FIG. 5B) and applied to two independent methods to quantify editing of the de-immunized Cas9 variants. First, a gene-rescue experiment was performed using low frequency homology directed repair (HDR) to repair a genetically encoded broken green fluorescent protein (GFP) gene. (FIG. 2e); and second, editing by genomic DNA extraction and Illumina next generation sequencing (NGS) was quantified using the CRISPResso2 package (FIG. 5B). Variants connected to neighbors were capable of editing, whereas those not connected were non-functional, providing further confidence in the network that was constructed. From these V4 was chose, which demonstrated high editing capability while still bearing 7 simultaneous mutations, as well as family members V3, a variant bearing two mutations, and V5, a variant bearing one additional mutation from V4. The efficacy of these mutants was further evaluated side-by-side with wt SpCas9 across a panel of genes and cell types, and assessed V4 activity across both targeted genome editing and epigenome regulation experiments (FIG. 6a-c). Together, these results confirmed that leveraging the unique combinatorial library design and screening strategy, Cas9 variants were produced with multiple top immunogenic epitopes simultaneously mutated (Figure Sc) while still retaining significant genome targeting functionality.

[0334] Delivery of wt SpCas9 and SpCas9v2 and CRISPRoff versions of the same as icRNAs was then evaluated. Both robust genome and epigenome targeting via the icRNA delivery format was observed (FIGS. 2F, 2G).

### Example 2: Robust Protein Translation and Genome Targeting Via In Situ Circularization of Large mRNA Payloads

[0335] Cell culture: HEK293T and HeLa cells were cultured in DMEM supplemented with 10% FBS and 1% Antibiotic-Antimycotic (Thermo Fisher). K562 cells were cultured in RPMI supplemented with 10% FBS and 1% Antibiotic-Antimycotic (Thermo Fisher). All cells were cultured in an incubator at 37° C. and 5% CO₂.

[0336] DNA transfections were performed by seeding HEK293T cells in 12 well plates at 25% confluency and adding 1 μg of each DNA construct and 4 μL of Lipofectamine 2000 (Thermo Fisher). RNA transfections were performed by adding 1 μg of each RNA construct and 3.5 μL of Lipofectamine MessengerMax (ThermoFisher). Electroporations were performed in K562 cells using the SF Cell Line 4D-Nucleofector X Kit S (Lonza) per manufacturer's protocol.

[0337] In vitro transcription: DNA templates for generating desired RNA products were created by PCR amplification from plasmids or gBlock gene fragments (IDT) and purified using a PCR purification kit (Qiagen). Plasmids were then generated with these templates containing a T7 promoter followed by 5′ ribozyme sequence, a 5′ ligation sequence, an IRES sequence linked to the product of interest, a 3′ UTR sequence, a 3′ ligation sequence, a 3′ ribozyme sequence, and lastly a poly-T stretch to terminate transcription. Linearized plasmids were used as templates and RNA products were then produced using the HiScribe 17 Quick High Yield RNA Synthesis Kit (NEB E2050) per manufacturer's protocol. For experiments utilizing m6A modified RNA, the Hiscribe T7 High Yield RNA Synthesis Kit (NEB E2040) was used, where 5% of ATP was substituted with N6-Methyladenosine-5′-Triphosphate (Trilink Biotechnologies N-1013). Linear mRNA was produced using the HiScribe T7 mRNA Kit with CleanCap Reagent AG (NEB E2080). All UTP was replaced with N1-Methylpseudouridine-5′-Triphosphate (Trilink Biotechnologies N-1081).

[0338] In vitro persistence experiments: To assess persistence of circular icRNA, HEK293T cells were transfected with linear icRNA GFP (which circularizes after delivery to HEK293T cells to produce circular icRNA GFP) or linear icdRNA and RNA was isolated 6 hours, one day, two days, and three days after transfection. qPCR was performed to assess the amount of GFP RNA and RT-PCR was performed to confirm circular icRNA persistence in cells receiving linear icRNA.

[0339] Persistence of circular icRNA containing a ECMV IRES, a WPRE, and a 50 adenosine poly(A) stretch compared to commercially sourced RNA (Trilink Biotechnologies, L-7601) with a 5′ cap and a poly(A) tail was similarly performed, with additional time points at day 4 and 5. RNA was isolated from cells and qPCR was performed to assess the amount of GFP RNA. The circular icRNAs are formed upon delivery of a precursor linear icRNAs into cells that circularized the linear icRNAs.

[0340] For cardiomyocyte experiments, H1 human embryonic stem cells were differentiated into cardiomyocytes using established protocols (98, 99). Briefly, stem cells were dissociated using Accutase and seeded into 12 well Matrigel coated plates. Cells were maintained in mTeSR1 (StemCell Technologies) for 3-4 days until cells reached about 95% confluence. Media was changed to RPMI containing B27 supplement and 10 μM CHIR99021. After 24 hours, media was changed to RPMI containing B27 supplement without insulin. Two days later, media was changed such that half of the cultured media was mixed with fresh RPMI containing B27 supplement without insulin and 5 μM IWP2. After two days, media was changed to RPMI containing B27 supplement without insulin. Media was then changed to RPMI containing B27 supplement every two days after that. Cardiomyocytes were transfected with linear icRNA containing an EMCV or CVB3 IRES, a WPRE, and a 165 adenosine poly(A) stretch (linear icRNA generates circular icRNA after transfection into the cardiomyocytes) or Trilink mRNA twelve days after CHIR99021 induction. 15 images were taken for each condition at each timepoint and GFP intensity was quantified using FIJI (NIH).

[0341] Flow cytometry experiments: To assess in vitro protein translation efficiencies, equal concentration of linear icRNA or Trilink mRNA was transfected into HEK293 Ts and GFP intensity was quantified the next day. GFP intensity, defined as the median intensity of the cell population, was quantified after transfection using a BD LSRFortessa Cell Analyzer.

[0342] Quantifying circular efficiency: To assess circular efficiency, linear icRNA containing an ECMV or CVB3 IRES, a WPRE, and a 165 adenosine poly(A) stretch was generated. RNA was then either frozen or pre-circularized using the RTCB ligase (NEB M0458S) per manufacturer's instructions. To remove any linear RNA, pre-circularized RNA was treated with RnaseR (Lucigen RNR07250) per manufacturer's instructions. Linear icRNA or pre-circularized icRNA was then transfected into HEK293 Ts and RNA was isolated from cells at 6, 24, and 48 hours. RT-PCR was performed and the intensity of the band for circular icRNAs generated from the circularization of linear icRNAs transfected into HEK293 Ts compared to pre-circularized icRNA was defined as the circular efficiency. All circular intensity values were normalized to respective GAPDH band intensity.

[0343] Lipid nanoparticle formulations: (6Z,9Z,28Z,31Z)-heptatriaconta-6,9,28,31-tetraen-19-yl-4-(dimethylamino) butanoate (DLin-MC3-DMA) was purchased from BioFine International Inc. 1,2-distearoyl-sn-glycero-3-phosphocholine (DSPC) and 1,2-dimyristoyl-rac-glycero-3-methoxypolyethylene glycol-2000 (DMG-PEG-2000) were purchased from Avanti Polar Lipids. Cholesterol was purchased from Sigma-Aldrich. mRNA LNPs were formulated with DLin-MC3-DMA:cholesterol:DSPC:DMG-PEG at a mole ratio of 50:38.5:10:1.5 and a N/P ratio of 5.4. To prepare LNPs, lipids in ethanol and mRNA in 25 mM acetate buffer, pH 4.0 were combined at a flow rate of 1:3 in a PDMS staggered herringbone mixer (100, 101). The dimensions of the mixer channels were 200 by 100 um, with herringbone structures 30 um high and 50 um wide. Immediately after formulation, 3 volumes of PBS was added and LNPs were purified in 100 kDa MWCO centrifugal filters by exchanging the volume 3 times. Final formulations were passed through a 0.2 um filter. LNPs were stored at 4° C. for up to 4 days before use. LNP hydrodynamic diameter and polydispersity index were measured by dynamic light scattering (Malvern NanoZS Zetasizer). The mRNA content and percent encapsulation were measured with a Quant-iT RiboGreen RNA Assay (Invitrogen) with and without Triton X-100 according to the manufacturer's protocol.

[0344] Animal experiments: All animal procedures were performed in accordance with protocols approved by the Institutional Animal Care and Use Committee of the University of California, San Diego. All mice were acquired from Jackson Labs.

[0345] To confirm circularization of linear icRNA constructs in vivo, 10 μg of linear GFP icRNA or linear GFP icdRNA LNPs were injected retro-orbitally into C57BL/J6J mice. After 3 days and 7 days, livers were isolated and placed in RNAlater (Sigma-Aldrich). RNA was later isolated using QIAzol Lysis Reagent and purified using RNeasy Mini Kit (Qiagen) according to the manufacturer's protocol. Amount of circularized RNA were assessed by RT-qPCR.

[0346] To assess circular icRNA persistence in vivo, equal concentration of linear EPO icRNA containing an ECMV or CVB3 IRES, WPRE, and a 165 adenosine poly(A) stretch (15 μg LNPs for EMCV) or linear EPO RNA were injected retro-orbitally into C57BL/6J mice. Blood draws were performed on days 0, 1, 2, 3, 4, and 7, serum was separated using blood collection tubes (Sarstedt), and EPO expression was then assessed by a sandwich enzyme-linked immunosorbent assay (ELISA, R&D Systems DEP00). EPO ELISA was performed per manufacturer's instructions, with 8 μL of serum used for each mouse. Persistence was assessed by dividing the EPO expression over time to the respective day 1 expression. On day 7, livers were isolated and RNA was extracted. qPCR was performed to assess EPO mRNA expression amongst the conditions and RT-PCR was performed to ensure circularization of the injected linear icRNA.

[0347] Cas9 alignment and mutation selection: Naturally occurring variation in Cas9 sequence space was explored by aligning BLAST hits of the SpCas9 amino acid sequence. This set was then pruned by removing truncated, duplicated, or engineered sequences, and those sequences whose origin could not be determined. At specified immunogenic epitopes and key anchor residues, top alternative amino acids were obtained using frequency in the alignment weighted by overall sequence identity to the wild type SpCas9 sequence, such that commonly occurring amino acid substitutions appearing in sequences highly similar to the wild-type were prioritized for further analysis and potential inclusion in the LORAX library.

[0348] HLA freguencv estimation and binding predictions: HLA-binding predictions were carried out using netMHC4.1 or netMHCpan3.1. Global HLA allele frequencies were estimated from data at allelefrequencies.net as follows. Data was divided into 11 geographical regions. Allele frequencies for each of those regions were estimated from all available data from populations therein. These regional frequencies were then averaged weighted by global population contribution. Alleles with greater than 0.001% frequency in the global population, or those with greater than 0.01% in any region, were included for further analysis and predictions.

[0349] Immunogenicity scores: The vector of predicted nM affinities output by netMHC were first normalized across alleles to account for the fact that some alleles have higher affinity across all peptides, and to allow for the relatively equivalent contribution of all alleles. These values were then transformed using the 1-log(affinity) transformation also borrowed from netMHC such that lower nM affinities will result in larger resulting values. These transformed, normalized affinities are then weighted by population allele frequency and summed across all alleles and epitopes. Finally, the scores are standardized across proteins to facilitate comparison.

[0350] Identification of HPRT1 Guide: The lentiCRISPR-v2 plasmid (Addgene #52961) was first digested with Esp3I and a guide targeting the HPRT1 gene was cloned in via Gibson assembly. After lentivirus production, HeLa cells were seeded at 25% confluency in 96 well plates and transduced with virus (lentiCRISPR-v2 with or without HPRT1 guide) and 8 μg/mL polybrene (Millipore). Virus was removed the next day and 2.5 μg/mL puromycin was added to remove cells that did not receive virus two days later. After 2 days of puromycin selection, 0-14 μg/mL 6-TG was added. After 5 days, cells were stained with crystal violet, solubilized using 1% sodium dodecyl sulfate, and absorbance was measured at 595 nm on a plate reader. 6 μg/mL was chosen due to the lack of cells in the negative control.

[0351] Generation of variant Cas9 library: Cas9 variant sequences were generated by separating the full-length gene sequence into small sections, where each section contained wildtype or variant Cas9 sequences. Degenerate pools of these gBlocks were PCR amplified and annealed together, yielding a final library size of 1,492,992 elements. The lentiCRISPR-v2 plasmid containing the HPRT1 guide was digested with BamHI and XbaI and Gibson assembly was used to clone elements into the vector. The Gibson reactions were then transformed into electrocompetent cells and cultured at 37° C. overnight. Plasmid DNA was isolated using the Qiagen Plasmid Maxi Kit and library coverage was estimated by calculating the number of colonies found on LB-carbenicillin plates. DNA was then used to create lentivirus containing the variant Cas9 library.

[0352] Cas9 Screen: HeLa cells were seeded in 15 15-cm plates at a density of 10 million cells/plate and transduced with virus containing the variant Cas9 library and 8 μg/mL polybrene the next day at a MOI of 0.3. Media was changed the next day and 2.5 μg/mL puromycin was added to remove cells that did not receive virus two days later. 6 μg/mL 6-TG was added to media once cells reached 90% confluency. Media was changed every other day for ten days to allow for selection of cells containing functional Cas9 variants. After ten days, cells were lifted from the plates and DNA was isolated using the DNeasy Blood & Tissue Kit per manufacturer's protocol.

[0353] Nanopore Sequencing: Pre-screen analysis of the Cas9 variant library elements was performed by amplifying the sequence from the plasmid. 1 μg of the variant Cas9 sequences was used for library preparation using the Ligation Sequencing Kit (Oxford Nanopore Technologies, SQK-LSK109) per manufacturer's instructions. DNA was then loaded into a MinION flow cell (Oxford Nanopore Technologies, R9.4.1). Post-screen analysis of library elements was performed by amplifying the Cas9 sequences from 75 μg of genomic DNA. 1 μg of the variant Cas9 sequences was similarly prepared using the Ligation Sequencing Kit and sequenced on a MinION flow cell.

[0354] Base calling and genotyping: Raw reads coming off the MinION flow cell were base-called using Guppy 3.6.0 and aligned to an SpCas9 reference sequence containing non-informative NNN bases at library mutation positions, so as not to bias calling towards wild-type or mutant library members, using Minimap2's map-ont presets. Reads covering the full length of the Cas9 gene with high mapping quality were genotyped at each individual mutation site and tabulated to the corresponding library member. Reads with ambiguous sites were excluded from further analysis.

[0355] Cluster analysis: Network analysis was performed by first thresholding genotypes to include only those identified as hits from the screen. These were genotypes appearing in the pre-screen plasmid library, both post-screen replicates, and having a fold-change enrichment larger than the wild-type sequence (4.5-fold enrichment). These hits were used to create a graph with nodes corresponding to genotypes and node sizes corresponding to fold change enrichment. Edges were placed between nodes at most 4 mutations distant from each other, and edge weights were defined by 1/d where d is distance between genotypes. Network analysis was done using python bindings of igraph. Plots were generated using the Fruchterman-Reingold force-directed layout algorithm.

[0356] HDR validation: Lentivirus was produced from a plasmid containing a GFP sequence with a stop codon and 68 bp AAVS1 fragment. HEK293T cells were treated with 8 μg/mL polybrene and lentivirus. After puromycin selection to create a stable line, cells were transfected with plasmids containing variant Cas9 sequences, a guide targeting the AAVS locus and a GFP repair donor plasmid. After 3 days, FACS was performed and percent GFP positive cells were quantified.

[0357] Genome engineering experiments: To validate variant Cas9 functional cutting, variant Cas9 and guides were transfected into HEK293T cells. After two days, genomic DNA was isolated. Genomic DNA was also isolated after two days from K562 cells after electroporation. To assess activity of CCR5 ZFNs delivered as icRNAs, HEK293 Ts were transfected with linear icRNA (which undergoes circularization in the cells to form the corresponding circular icRNA) or linear icdRNA and genomic DNA was isolated after three days. Assessment of GFP ZFN was performed by transfecting HEK293 Ts stably expressing a broken GFP with linear icRNA or linear icdRNA and isolating genomic DNA after three days. To assess activity of Cas9 delivered as icRNAs, HEK293 Ts and K562 were transfected or nucleofected with Cas9 WT or Cas9 v4 along with a guide RNA (synthesized via Synthego) and genomic DNA was isolated after three days.

[0358] Zinc finger experiments were performed by transfecting HEK293T cells with 0.5 μg of left and right arms of each zinc finger as either linear icRNA (which undergoes circularization in the cells to form the corresponding circular icRNA) or icdRNA. After three days, genomic DNA was isolated.

[0359] Epigenome engineering experiments: dCas9-VPR experiments were performed by transfecting HEK293T cells with dCas9 wt-VPR or dCas9v4-VPR with or without a gRNA targeting the ASCL1 gene. Likewise, KRAB-dCas9 experiments were performed by transfecting cells with KRAB-dCas9 wt or KRAB-dCas9v4 with or without a gRNA targeting the CXCR4 gene. CRISPRoff experiments were performed by transfecting HEK293T cells with circular icRNA CRISPRoffwt or CRISPRoffv4 with or without a gRNA targeting the B2M gene (Synthego). RNA was isolated three days later and repression or activation of genes was assessed by qPCR

[0360] Quantification of editing using NGS: After extraction of genomic DNA, PCR was performed to amplify the target site. Amplicons were then indexed using the NEBNext Multiplex Oligos for Illumina kit (NEB). Amplicons were then pooled and sequenced using a Miseq Nano with paired end 150 bp reads. Editing efficiency was quantified using CRISPResso2.

[0361] Cas9 Specificity: RNA isolated from the CRISPRoff experiment was used to assess specificity. RNAseq libraries were generated from 300 ng of RNA using the NEBNext Poly(A) mRNA magnetic isolation module and NEBNext Ultra II Directional RNA Library Prep kit for Illumina and sequenced on the Illumina NovaSeq 6000 with paired end 100 bp reads. Fastq files were mapped to the reference human genome hg38 using STAR aligner. Differential gene expression was analyzed using the Bioconductor package DESeq2 with the cutoff of log 2(fold change) greater than 0.5 or less than −0.5 and a p-value less than 10-3. To identify differentially expressed genes, CRISPRoff WT and V4 samples containing the B2M guide were compared to samples not receiving the guide.

[0362] ELISpetaay: TAP-deficient T2 cells were a generous gift from Stephen Schoenberger lab. PBMCs were purchased from StemCell Technologies. All donors contained the HLA-A*0201 allele. Both cell lines were maintained in RPMI1640 media supplemented with 10% FBS, 1% Penicillin-Streptomycin, 10 mM HEPES, and 1 mM sodium pyruvate. On the first day, PBMCs were thawed and rested overnight at a density of 106 cells/mL. T2 cells were pulsed with peptides at 10 μg/mL overnight. Peptides were produced from Genscript's Custom Peptide Synthesis service at crude purity. Lastly, 96-well plates (Immobilon-P, Millipore) were coated with 10 μg/mL anti-IFNγ monoclonal antibody (1-DIK, Mabtech) overnight at 4° C. The next day, T2 cells were washed two times and 50,000 T2 cells and 100,000 PBMCs were added to each well. 4 replicates were used per condition. After 22 hours, cells were removed from the plate and 2 μg/mL biotinylated anti-IFNγ secondary antibody (7-B6-1, Mabtech) was added for 2 hours. Plates were washed and 1:1000 Streptavidin-ALP (3310-10-1000, Mabtech) was added for 45 minutes. Plates were washed and color was developed by adding BCIP/NBT-plus substrate (3650-10, Mabtech) for 10 minutes. Plates were thoroughly washed in water, dried at room temperature, and spots were automatically counted using an ELISpot plate reader.

[0363] To assess the immunogenicity of the full length Cas9 wildtype and variant protein, in vitro transcribed RNA encoding for wildtype or V4 was electroporated into PBMCs as previously described (82, 83). As PBMCs contain both antigen presenting cells (APCs) and T cells, it is possible to electroporate RNA directly into these APCs and assess T cell response via the ELIspot. Electroporation was performed using the P3 Primary Cell 4D-Nucleofector X Kit (Lonza V4XP). Briefly, PBMCs were first thawed and rested overnight at a density of 10⁶ cells/mL. The next day, 1×10⁶ PBMCs were resuspended in 20 μl of Lonza P3 nucleofector solution and mixed with 1 μg RNA. After electroporation, 2×10⁵ cells were added to each well of an ELISpot plate already coated with anti-IFNγ monoclonal antibody as described above. After 28 hours, cells were removed from the plate and the ELISpot assay and analysis was performed as described.

[0364] Lentivirus production: HEK293FT cells were seeded in 1 15-cm plate and transfected with 36 μL Lipofectamine 2000, 3 μg pMD2.G (Addgene #12259), 12 μg pCMV delta R8.2 (Addgene #12263), and 9 μg of the lentiCRISPR-v2 plasmid. Supernatant containing viral particles was harvested after 48 and 72 hours, filtered with 0.45 μm Steriflip filters (Millipore), concentrated to a final volume of 1 mL using an Amicon Ultra-15 centrifugal filter unit with a 100,000 NMWL cutoff (Millipore), and frozen at −80° C.

[0365] RT-qPCR: cDNA was synthesized from RNA using the Protoscript II First Strand cDNA Synthesis Kit (NEB). qPCR was performed using a CFX Connect Real Time PCR Detection System (Bio-Rad). All samples were run in triplicates and results were normalized against GAPDH expression. Primers for qPCR are listed in Table 3 below.

TABLE 1
IRES Constructs Screened

| No. | Name | SEQ ID NO: |
|---|---|---|
| 1 | IRES_Cricket Paralysis Virus | 1361 |
| 2 | IRES_Homo Sapiens IGF2 | 1362 |
| 3 | IRES_Hepatovirus A | 1363 |
| 4 | IRES_Hepatitis C Virus H77 Isolate | 1364 |
| 5 | IRES_Homo Sapiens FGF1 | 1365 |
| 6 | IRES_Bovine Viral Diarrhea Virus 1 | 1366 |
| 7 | IRES_Human Rhinovirus A89 | 1367 |
| 8 | IRES_Pan Paniscus LIMA1 | 1368 |
| 9 | IRES_Human Adenovirus 2 | 1369 |
| 10 | IRES Montana Myotis | 1370 |
| | Leukoencephelitis Virus | |
| 11 | IRES Homo Sapiens RANBP3 | 1371 |
| 12 | IRES_Pestivirus Giraffe 1 | 1372 |
| 13 | IRES_Homo Sapiens TGIF1 | 1373 |
| 14 | IRES_Human Poliovirus 1 Mahoney | 1374 |
| 15 | IRES Foot-and-Mouth Disease Virus | 1375 |
| | Type O | |
| 16 | IRES Encephalomyocarditis Virus_7A | 1376 |
| 17 | IRES Encephalomyocarditis Virus_6A | 1377 |
| 18 | IRES Enterovirus 71 | 1378 |
| 19 | IRES_Coxsackievirus B3 | 1379 |

TABLE 2
3′ UTR Constructs Screened

| No. | Name | SEQ ID NO: |
|---|---|---|
| 1 | IRES_Encephalomyocarditis Virus_7A | 1376 |
| 2 | IRES_Encephalomyocarditis Virus_6A | 1377 |
| 3 | IRES_Encephalomyocarditis Virus_6A + WPRE | 1380 |
| 4 | IRES_Encephalomyocarditis Virus_6A + WPRE + pA50 3′ | 1381 |
| 5 | IRES_Encephalomyocarditis Virus_6A + WPRE + pA120 3′ | 1382 |
| 6 | IRES_Encephalomyocarditis Virus_6A + WPRE + pA165 3′ | 1383 |
| 7 | IRES_Encephalomyocarditis Virus_6A + WPRE + pA165 3′ + mtRNR1-AES | 1384 |
| | 3′ UTR | |
| 8 | IRES_Encephalomyocarditis Virus_6A + WPRE + pA165 3′ + mtRNR1- | 1385 |
| | LSP1 3′ UTR | |
| 9 | IRES_Encephalomyocarditis Virus_6A + WPRE + pA165 3′ + AES-mtRNR1 | 1386 |
| | 3′ UTR | |
| 10 | IRES_Encephalomyocarditis Virus_6A + WPRE + pA165 3′ + AES-hBg 3′ | 1387 |
| | UTR | |
| 11 | IRES_Encephalomyocarditis Virus_6A + WPRE + pA165 3′ + FCGRT-hBg 3′ | 1388 |
| | UTR | |
| 12 | IRES_Encephalomyocarditis Virus_6A + WPRE + pA165 3′ + 2hBg 3′ UTR | 1389 |
| 13 | IRES_Encephalomyocarditis Virus_6A + WPRE + pA165 3′ + HBA1 3′ UTR | 1390 |
| 14 | IRES_Coxsackievirus B3 + WPRE + pA165 3′ | 1391 |
| 15 | icChang_AES-mtRNR1 | 1392 |
| 16 | icChang_HBA1 | 1393 |
| 17 | Trilink Biotechnologies commercial linear mRNA | — |

TABLE 3
qPCR Primers

| | | SEQ |
|---|---|---|
| | | ID |
| Name | Sequence | NO: |
| CXCR4_F | GAAGCTGTTGGCTGAAAAGG | 1394 |
| CXCR4_R | CTCACTGACGTTGGCAAAGA | 1395 |
| ASCL1_F | CGCGGCCAACAAGAAGATG | 1396 |
| ASCL1_R | CGACGAGTAGGATGAGACCG | 1397 |
| B2M_F | TATGCCTGCCGTGTGAACCATGT | 1398 |
| B2M_R | GGCATCTTCAAACCTCCATGATGCT | 1399 |
| hGAP_F | ACAGTCAGCCGCATCTTCTT | 1400 |
| hGAP_R | ACGACCAAATCCGTTGACTC | 1401 |
| hPCSK9_F | ATCCACGCTTCCTGCTGC | 1402 |
| hPCSK9_R | CACGGTCACCTGCTCCTG | 1403 |
| GFP_F | ACGTAAACGGCCACAAGTTC | 1404 |
| GFP_R | AAGTCGTGCTGCTTCATGTG | 1405 |
| circ_F | ACAACCACTACCTGAGCACC | 1406 |
| circ_R | AATTCCGCGGGCCCGT | 1407 |

[0366] RNAs have emerged as a powerful therapeutic class. However their typically short half-life impacts their activity both as an interacting moiety (such as siRNA), as well as a template (such as mRNAs). Towards this, RNA stability has been modulated using a host of approaches, including engineering untranslated regions, incorporating cap analogs, modifying nucleosides, and optimizing codons (1-5). More recently, novel circularization strategies, which remove free ends necessary for exonuclease-mediated degradation thereby rendering RNAs resistant to most mechanisms of turnover, have emerged as a particularly promising methodology (6-15). However, simple and scalable approaches to achieve efficient production and purification of circular RNAs are lacking, thus limiting their broader application in research and translational settings.

[0367] Circular guide RNAs for programmable RNA editing was engineered. The primary approach was via delivery of encoding DNA molecules where the guide RNAs were expressed using pol-III promoters, and thereby were both generated and circularized in cells. However, it was observed that in vitro transcribed RNAs delivered in linear form could successfully circularize in situ in cells upon entry and were similarly functional as guide RNAs. Motivated by the extreme simplicity of this latter approach, and its compatibility with routine in vitro synthesis and purification processes, this framework was explored to determine if it could also be used to generate circular RNAs encoding messenger RNAs. Indeed, as demonstrated herein engineered in situ gircularized RNAs (icRNAs) enable extensive protein translation, and demonstrate their utility across both in vitro and in vivo settings, and across persistent transgene delivery and genome targeting applications.

[0368] Common to all these applications enabled via linear icRNA delivery is the critical consideration of their immune system interactions. Although for some applications, such as vaccines, robust immune responses to a delivered transgene are desirable, for other applications such as genome and epigenome targeting, immune responses can instead inhibit therapeutic effects (18, 19). Inducing immune responses through RNA delivery has been researched in vaccine development and proven through the success of COVID vaccines based on this technology (20-23). However, despite substantial engineering efforts, deimmunization remains a problem (24). Thus, to facilitate compatibility between persistence of expression and immunogenicity especially when delivering non-human payloads via icRNAs, a long-range multiplexed (LORAX) protein engineering methodology was developed based on high-throughput screening of combinatorially deimmunized protein variants. This was applied to identify a Cas9 variant with seven key HLA-restricted epitopes simultaneously immunosilenced after a single round of screening, and showed that icRNA-mediated delivery of the same enabled robust genome targeting.

[0369] Results: To engineer linear icRNAs, in vitro transcribed linear RNAs were generated that bear a twister ribozyme (also referred to as linearized ribozyme-RNAs) flanked internal ribosome entry site (IRES) coupled to a messenger RNA of interest and a 3′ untranslated region (UTR) (FIG. 7A). Once transcribed, the flanking twister ribozymes rapidly self-cleave, enabling hybridization of the complementary ligation stems to one another. Upon delivery into cells, these linear RNAs (linear icRNA; also referred to as linearized ribozyme activated RNAs) are then circularized in situ via ligation of the proximal 5′ and 3′ ends by the ubiquitous cellular RNA ligase RtcB to generate circular icRNAs. To evaluate this circularization approach, green fluorescent protein (GFP) RNA persistence was assayed in the circular icRNA format in vitro in HEK293T cells. As a direct side-by-side comparison, a linear in situ Circularization gefective RNAs (icdRNAs) was engineered by utilizing catalytically inactive mutants of the twister ribozymes. Specifically, HEK293 Ts were transfected with linear GFP icRNA or linear icdRNA, wherein the linear GFP icRNA circularized in the HEK293 Ts to generate circular GFP icRNA, and RNA was isolated at 6 hours, 1 day, 2 days and 3 days after transfection. Similar amounts of GFP RNA was observed at 6 hours (FIG. 7B, left panel), confirming that approximately equal quantities of icRNA and icdRNA were delivered to cells. However, GFP RNA with functional circularization was significantly higher at days 1, 2, and 3 than icdRNA, indicating improved RNA persistence via circularization (FIG. 7B, middle panel). This improved RNA persistence also correlated with increased GFP translation at 3 days (FIG. 7B, right panel). To confirm linear GFP icRNAs were covalently circularized in cells upon delivery in vitro, RT-PCR was performed by designing outward facing primers that selectively amplified only the circularized RNA molecules. Indeed, only a PCR product for circular GFP icRNAs was observed, confirming successful circularization (FIG. 7C).

[0370] To improve protein translation from icRNAs, a panel of 19 naturally occurring and synthetic IRES sequences were screened (Table 1) (27-231). The 6A form of the Encephalomyocarditis virus IRES (EMCV, FIG. 7D, blue bar, #17), the Enterovirus 71 IRES, and the Coxsackievirus B3 IRES (CVB3, FIG. 7D, green bar, #19) were found to be the best at enabling cap-independent protein translation. To further improve protein translation, a panel of 3′ untranslated regions (UTRs, Table 2) were screened in the context of the EMCV 6A IRES. Addition of a Woodchuck Hepatitis Virus Posttranscriptional Regulatory Element (WPRE) and a poly(A) stretch improved relative protein translation by over 5 fold, but additional 3′ untranslated regions (UTRs) did not improve translation efficiency (FIG. 7E, blue bars, #3-13). For all subsequent studies, icRNAs based on either the EMCV IRES or CVB3 IRES coupled to a WPRE and 165 bp poly(A) stretch were used (FIG. 7E, green bar, #14). Notably, these designs showed enhanced activity (FIG. 7E, gray bars, #15-16). The constructs having 5′ capped linear RNA (FIG. 7E, red bar, #17) enabled higher instantaneous protein translation 24 hrs post delivery (2-3 fold), but the circular icRNAs enabled significantly improved persistence of protein translation over multiple days (FIG. 12A; see, e.g., circle). Next, to assess in situ circularization efficiency, HEK cells were transfected with linear icRNAs or with icRNAs pre-circularized in vitro using RtcB ligation in a test tube followed by RNaseR treatment to enrich pre-circularized icRNA species. RT-PCR was performed using outward facing primers and normalized to GAPDH expression. Across independent icRNA designs (comprising either EMCV IRES (left bar at each time point) or CVB3 IRES (right bar at each time point), efficient (˜20%) in situ circularization levels for icRNAs compared to pre-circularized icRNA was observed (FIG. 7F). As a final check of circularization, the ligation junction was mapped correctly to its predicted location via Sanger sequencing of the RT-PCR product (FIG. 7G). To ensure that linear icRNAs were also capable of circularization in vivo, lipid nanoparticles (LNPs) containing either linear icRNA (that undergoes in vivo circularization to form circular icRNA) or linear icdRNA were generated and retro-orbitally injected them into mice. LNPs for each condition were successfully generated of similar size (FIG. 12B). Livers were isolated three and seven days after injection and RT-PCR confirmed circularization in vivo persisting for at least seven days (FIG. 12C). In addition, linear icRNA and linear icdRNA versions were generated containing 5% N6-methyladenosine (m6A) modification. Compared to unmodified linear RNA which induces a huge innate immune response, the immune responses to N¹-Methylpseudouridine-5′-Triphosphate (pseudo-UTP) modified linear RNA and m6A modified and unmodified linear icRNAs were observed to be low in vitro (FIG. 12D). Taken together, these studies demonstrated the ability to tune protein translation from icRNAs over an order of magnitude via choice of IRES and 3′ UTR sequences.

[0371] Experiments were performed to validate circular icRNA persistence across in vitro and in vivo settings. First investigation was performed regarding utility in stem cell derived cells. RNA-based strategies have gained increasing relevance in the context of tissue engineering and regenerative medicine, but the short half-life of mRNA severely limits their utility in this space. For example, whereas cell fate reprogramming can take 1-4 weeks to induce, previous studies have demonstrated that protein expression lasts about 4 days after RNA transfection in this context (33, 34). In addition, it is important to note that gene dosage can mediate cell response. For instance, CRISPRa-mediated overexpression of OCT4 induced iPSC reprogramming whereas cDNA-mediated OCT4 overexpression did not due to much higher RNA and protein expression in cDNA-treated conditions (35). Thus, the ideal RNA strategy would have a “Goldilocks” effect: a moderate protein expression that persists for weeks. To that end, linear icRNA containing either an EMCV or CVB3 IRES, a WPRE, and a 165 poly(A) stretch or a commercial linear capped RNA with optimized UTRs were transfected into stem cell-derived cardiomyocytes, wherein the linear icRNA circularized in stem cell-derived cardiomyocytes to generate the corresponding circular icRNA (FIG. 8A; linear icRNA with EMCV IRES is top data line, linear icRNA with CVB3 IRES is middle data line, and commercial linear capped RNA is bottom data line). Very high expression with linear capped RNA was observed with optimized UTRs that, as expected, rapidly declined over 3-5 days, whereas circular icRNA (formed from linear icRNA) exhibited consistent expression that persisted for over two weeks. It was observed that CVB3 IRES (FIG. 7D) induced significantly higher expression in HEK293T cells, interestingly, similar expression levels were observed using the EMCV IRES compared to the CVB3 in the cardiomyocyte context (FIG. 8B), implying potential cellular context dependence on activity of IRESs.

[0372] Experiments were then performed to extend these results in vivo. Towards this, lipid nanoparticles (LNPs) (36, 37) were synthesized bearing either linear icRNA or linear RNA encoding for the human erythropoietin (EPO) gene (Figure C). RNA/LNPs were retro-orbitally injected into C57BL/6 mice, wherein the linear icRNA circularized to produce circular icRNA in cells after injection, and serum was collected over one week to assess EPO levels. Interestingly, m6A modification significantly improved circular icRNA persistence compared to linear RNA or unmodified circular icRNA. Consistent with in vitro results, the in vivo innate immune responses to (pseudo-UTP) modified linear RNA and m6A modified icRNAs were also similar (FIG. 12E). Liver transcriptomes were assayed 7 days after injection. While linear EPO RNA was largely degraded by day 7, circular EPO icRNA persisted (FIG. 8D). Furthermore, RT-PCR also confirmed successful in situ circularization of linear icRNA in vivo (Figure E).

[0373] Spurred by the above results, it was hypothesized that this increased persistence of circular icRNAs, in addition to enabling applications entailing sustained transgene expression, could also facilitate efficient genome and especially epigenome targeting. Towards this, icRNA utility was explored in the context of zinc finger (ZF) proteins, as being a solely protein-based genome engineering toolset it was expected ZFs would be particularly suited for this mode of delivery. Indeed a more efficient genome editing via zinc finger nuclease (ZFN) icRNAs was observed compared to corresponding icdRNAs targeting the GFP and CCR5 genes (FIG. 9). Building on this observation, delivery of Zinc Finger KRAB proteins to programmably repress genomic targets was investigated. PCSK9, a gene that encodes an enzyme that regulates low-density lipoprotein (LDL) receptor degradation, was used. Loss-of-function mutations in PCSK9 are associated with reduced risk of cardiovascular disease with no documented adverse side effects (40-42). Antibodies, antisense oligonucleotides, and CRISPRs have all been utilized to target PCSK9 (43-49), and here experiments were performed to examine if a transient pulse of zinc finger epigenome regulators could enable repression of PCSK9. For in vitro studies, HeLa cells comprising a panel of 20 ZF-KRAB proteins delivered as icRNAs were screened (FIG. 9B, left panel). These ZFs tiled across 0-500 bp of the transcription start site (TSS) of hPCSK9, and notably, 9 of these enabled robust gene repression (90-50%). Experiments were then performed to validate 3 of these via concurrent delivery to enable over 95% repression of hPCSK9 in cultured cells (FIG. 9B, right panel). Following this, 10 ZF-KRAB proteins targeting mPCSK9 were screened in mice, delivered as icRNAs packaged in LNPs. Similar to above, the top 3 ZF-KRABs were validated via concurrent delivery as icRNAs loaded into LNPs, observing ˜50% in vivo mPCSK9 repression in mice livers (FIG. 9B). Taken together, these results establish that a transient pulse of zinc finger epigenome regulators delivered as icRNAs can enable robust gene repression both in vitro and in vivo, enabling a genomically scarless and safe approach for modulating therapeutic gene expression.

[0374] Building on these results with zinc finger proteins, experiments were performed to explore if circular icRNA persistence could be similarly enhance the activity of CRISPR-Cas9 systems. However, unlike for ZFs, which are built on a human protein chassis, this feature of persistence could aggravate immune responses in therapeutic settings for CRISPR systems as those are derived from prokaryotes, including some residing in the human gut microbiome (50-53). Thus, to enable compatibility between persistence of expression and immunogenicity, experiments were performed to develop a methodology to screen progressively deimmunized SpCas9 proteins by combinatorially mutating particularly immunogenic epitopes.

[0375] While variant library screening has proven to be an effective approach to protein engineering (55-62), applying it to deimmunization faces three important technical challenges. One, the need to mutate multiple sites simultaneously across the full length of the protein; two, reading out the associated combinatorial mutations scattered across large (>1 kb) regions of the protein via typical short-read sequencing platforms; and three, engineering fully degenerate combinatorial libraries which can very quickly balloon to unmanageable numbers of variants (24, 63). To overcome these challenges several methodological innovations were developed which, taken together, comprise a novel long range multiplexed (LORAX) protein engineering platform capable of screening millions of combinatorial variants simultaneously with mutations spread across the full length of arbitrarily large proteins (FIG. 10).

[0376] Towards library design, in order to narrow down the vast mutational space associated with combinatorial libraries, an approach guided by evolution and natural variation was used. As deimmunizing protein engineering seeks to alter the amino acid sequence of a protein without disrupting functionality, it is extremely useful to narrow down mutations to those less likely to result in non-functional variants. To identify these mutants large alignments of Cas9 orthologs were generated from publicly available data to identify low-frequency SNPs that have been observed in natural environments. Such variants are likely to have limited effect on protein function, as highly deleterious alleles would tend to be quickly selected out of natural populations (if Cas9 activity is under purifying selection) and therefore not appear in sequencing data (66). To further subset these candidate mutations, immunogenicity was evaluated in silico using the netMHC epitope prediction software (67, 68), in order to determine to what degree the candidate mutations are likely to result in the deimmunization of the most immunogenic epitopes in which they appear. This is a useful step as many mutations may have little effect on overall immunogenicity (69-71). Screening for decreased peptide-MHC class I binding filters out amino acid substitutions which are likely immune-neutral, substantially increasing the likelihood of functional hits with enough epitope variation to evade immune induction (71, 72).

[0377] Next, long-read nanopore sequencing was applied to measure the results of the screens of our combinatorial libraries. This circumvents the limit of short target regions and obviates the need for barcodes altogether by single-molecule sequencing of the entire target gene, enabling library design strategies which can explore any region of the protein in combination with any other region without any complicated cloning procedures required to facilitate barcoding (73). To date, the adoption of nanopore sequencing has been limited by its high error rate, around 95% accuracy per DNA base (74), as compared to established short read techniques which are multiple orders of magnitude more accurate. To address this challenge, the libraries were designed such that each variant that was engineered would have multiple nucleotide changes for each single target amino acid change, effectively increasing the sensitivity of nanopore based readouts with increasing numbers of nucleotide changes per library member. The large majority of amino acid substitutions are amenable to a library design paradigm in which each substitution is encoded by two, rather than one, nucleotide changes, due to the degeneracy of the genetic code and the highly permissive third “wobble” position of codons.

[0378] The scale of engineering which would be required to generate an effectively deimmunized Cas9 is not fully understood, as combinatorial deimmunization efforts at the scale of proteins thousands of amino acids long have not yet been possible. Therefore, to roughly estimate these parameters an immunogenicity scoring metric was developed that takes into account all epitopes across a protein and the known diversity of MHC variants in a species weighted by population frequency to generate a single combined score representing the average immunogenicity of a full-length protein as a function of each of its immunogenic epitopes (75). Formally, this score is calculated as:

$${I}_{x} = \frac{{\sum }_{i}^{m} {\sum }_{j}^{n} {w}_{j} ( 1 - log ( {k}_{i j} * j ) )}{y}$$

[0379] Iₓ=Immunogenicity score of protein x, i=epitopes, j=HLA alleles, j=allele specific standardization coefficient, wⱼ=HLA allele weights, kᵢⱼ=predicted binding affinity of epitope i to allele j, and y=protein specific scaling factor.

[0380] The overall effect of mutating the top epitopes in several Cas9 orthologs was predicted (FIG. 13A). As might be expected, this analysis suggests that single-epitope strategies are woefully inadequate to deimmunize a whole protein for multiple HLA types, and also that there are diminishing returns as more and more epitopes are deimmunized. The analysis suggests that it may require on the order of tens of deimmunized epitopes to make a significant impact on overall, population-wide protein immunogenicity. The scale of engineering demanded by these immunological facts has previously been intractable, but by applying LORAX it is conjectured one could now make substantial steps, several mutations at a time, through the mutational landscape of the Cas9 protein.

[0381] Specifically, applying the procedure above, a library of Cas9 variants was designed based on the SpCas9 backbone containing 23 different mutations across 17 immunogenic epitopes (FIG. 10). Combining these in all possible combinations yields a library of 1,492,992 unique elements. With this design, the library was constructed in a stepwise process. First, the full-length gene was broken up into short blocks of no more than 1000 bp, which overlap by 30 bp on each end. Each block is designed such that it contains no more than 4 target epitopes to mutagenize. With few epitopes per block and few variant mutations per epitope, it becomes feasible to chemically synthesize each combination of mutations for each block. Each of these combinations was then synthesized and mixed at equal ratios to make a degenerate block mix. This was repeated for each of the blocks necessary to complete the full-length protein sequence via fusion PCR

[0382] To identify functional variants still capable of editing DNA, a positive selection screen targeting the hypoxanthine phosphoribosyltransferase 1 (HPRT1) gene was designed and carried out (76). In the context of the screen, HPRT1 converts 6-thioguanine (6TG), an analogue of the DNA base guanine, into 6-thioguanine nucleotides that are cytotoxic to cells via incorporation into the DNA during S-phase (77). Thus, only cells containing functional Cas9 variants capable of disrupting the HPRT1 gene can survive in 6TG-containing cell culture media. To first identify the optimal 6TG concentration, HeLa cells were transduced with lentivirus particles containing wild-type Cas9 and either a HPRT1-targeting guide RNA (gRNA) or a non-targeting guide. After selection with puromycin, cells were treated with 6TG concentrations ranging from 0-14 μg/mL for one week. Cells were stained with crystal violet at the end of the experiment and imaged. 6 μg/mL was selected as all cells containing non-targeting guide had died while cells containing the HPRT1 guide remained viable (FIG. 13B).

[0383] To perform the screen, replicate populations of HeLa cells were transduced with lentiviral particles containing the variant SpCas9 library along with the HPRT1-targeting gRNA at 0.3 MOI and at greater than 75-fold coverage of the library elements. Cells were selected using puromycin after two days and 6TG was added once cells reached 75% confluency. After two weeks, genomic DNA was extracted from remaining cells and full-length Cas9 amplicons were nanopore sequenced on the Oxford Nanopore (ONT) MinION platform.

[0384] MinION sequencing confirmed the majority of the pre-screened library consists of Cas9 sequences with significant numbers of mutations, with most falling into a broad peak between 6 and 14 mutations per sequence, each of which knocking out a key immunogenic epitope (FIG. 13C). Interestingly, the post-screening library was significantly shifted in the mutation density distribution, suggesting that the majority of the library with large (>4) numbers of mutations resulted in non-functional proteins which were unable to survive the screen. Meanwhile, wild-type, single, and double mutants were generally enriched as these proteins proved more likely to retain functionality and pass through the screen (FIG. 13C). Additionally, the two independent replicates of the screen showed strong correlation (R²=0.925) providing further evidence of robustness (FIG. 9). the change in overall frequency of mutations in the pre- and post-screen libraries was also analyzed to see if a pattern of mutation effects could be inferred. Although the wild-type allele was enriched at every site in the post-screen sequences, nearly every site retained a significant fraction of mutated alleles, suggesting that the mutations, at least individually, are fairly well-tolerated and do not disrupt Cas9 functionality (FIG. 13D).

[0385] In order to select hits for downstream validation and analysis, a method for differentiating high-support hits likely to be real from noise-driven false positive hits was devised. To do this it was hypothesized that the fitness landscape of the screen mutants is likely to be smooth, i.e. variants that contain similar mutations are more likely to have similar fitnesses in terms of editing efficiency compared to randomly selected pairs (78). This was confirmed by computing a predicted screen score for each variant based on a weighted regression of its nearest neighbors in the screen. This metric correlates well with the actual screen scores and approaches the screen scores even more closely as read coverage increases. This provides good evidence that the fitness landscape is indeed somewhat smooth (FIG. 14A). Next, it was reasoned that because the fitness landscape is smooth, real hits should reside in broad fitness peaks which include many neighbors that also show high screen scores, whereas hits that are less supported by near neighbors are more likely to be spurious as they represent non-smooth fitness peaks. Formalizing this logic, a network analysis was performed to differentiate noise-driven hits from bona fide hits by looking at the degree of connectivity with other hits (FIG. 11A).

[0386] Applying these analyses to the screen output led to the selection and construction of 20 variants (V1-20) for validation and characterization. Two independent methods were applied to quantify editing of the deimmunized Cas9 variants. First, a gene-rescue experiment was performed using low frequency homology directed repair (HDR) to repair a genetically encoded broken green fluorescent protein (GFP) gene (79) (FIG. 11B). And second, NHEJ mediated editing was quantified by genomic DNA extraction and Illumina next generation sequencing (NGS) using the CRISPResso2 package (FIG. 14B) (80). Variants highly connected to neighbors were capable of editing, whereas those not connected were non-functional, allowing selection of hits as enriching for truly functional sequences. Among the screen hits was the L614G mutation first identified by Ferdosi and colleagues (14) as a functional Cas9 variant with a critical immunodominant epitope de-immunized (V1). This concordance with previous work provided further confidence in the screening method. Interestingly, another deimmunizing mutation within the same epitope, L622Q (V2) was identified, which similarly retains Cas9 functionality, but appears to be more epistatically permissive, as many of the multi-mutation hits combine this mutation with other deimmunized epitopes. From these multi-mutation hits V4 was chosen, which demonstrated high editing capability while still bearing simultaneous mutations across seven distinct epitopes, as well as family members V3, a variant bearing two mutations, and V5, a variant bearing the seven changes from V4 plus one additional mutation.

[0387] To confirm that mutation of these epitopes indeed elicited de-immunization, T-cell response to wildtype and variant peptides were assessed by measuring IFN-γ secretion in the ELISpot assay (19, 54). Peripheral blood mononuclear cells (PBMCs) were used from three separate donors that carried the HLA-A*0201 allele as peptides were presented to cells using the TAP-deficient cell line T2 (HLA-A*0201 positive) (81). Correspondingly, peptides for epitopes 2, 7, 8, 9, 12, 15, and 16 were synthesized as the predictions suggested these epitopes would induce a reduction in immune response for the HLA-A*0201 allele (FIG. 15A). Importantly, since SpCas9v4 carries four of these mutations, this assay would also provide confirmation of deimmunization for this variant. The data shows that mutant peptides for all epitopes tested indeed resulted in fewer spot forming colonies for all three donors compared to wild type peptides (FIG. 11C, FIG. 15B), thereby confirming the predictions. To assess whether the full length protein is de-immunized, mRNA encoding for SpCas9WT and SpCas9V4 were generated and electroporated this into the PBMC populations. As PBMCs have a mixture of both antigen presenting cells (APCs) and T-cells (82, 83) the ability to introduce the RNA to the APCs and measure T-cell response via the ELISpot assay was possible. Excitingly, significantly fewer spot forming for full length SpCas9v4 compared to SpCas9WT for all three donors was observed (FIG. 11D, FIG. 15C).

[0388] Based on this, the efficacy of these mutants was evaluated side-by-side with WT SpCas9 across a panel of genes and cell types, and assessed V4 activity across both targeted genome editing and epigenome regulation experiments (FIG. 15A-15C) (84). Together, these results confirmed that leveraging the unique combinatorial library design and screening strategy, produced Cas9 variants with multiple top immunogenic epitopes simultaneously mutated while still retaining significant genome targeting functionality. Spurred by this, delivery of SpCas9WT and SpCas9v4 and CRISPRoff versions of the same as icRNAs were assessed. CRISPRoff represents one of the newest additions to the CRISPR toolbox with the exciting capability to permanently silence gene expression upon transient expression (85). It was conjectured that wtCas9 and CRISPRoff would represent exciting applications of icRNAs for hit-and-run genome and epigenome targeting, as the prolonged persistence could potentially boost targeting, while the use of partially deimmunized Cas9 proteins would enable greater safety in therapeutic contexts. Specifically, icRNA for WT SpCas9 or SpCas9v4, along with sgRNA targeting the AAVS1 locus, or icRNA for CRISPRoff versions along with sgRNA targeting the B2M gene were transfected into HEK293T (86). Excitingly, both robust genome and epigenome targeting via the icRNA delivery format was observed (FIGS. 11E-11F). Lastly, to assess the specificity of SpCas9v4 targeting, RNA sequencing on WT and SpCas9v4 CRISPRoff samples was performed with and without the B2M guide. As expected, B2M was significantly down-regulated in SpCas9WT and SpCas9v4 samples containing the sgRNA compared to samples with no guide (FIG. 16D, red dot—large dot). Importantly, all differentially expressed genes (DEGs) for V4 were also DEGs for WT, suggesting that SpCas9v4 and SpCas9WT are comparably specific in this assay (FIG. 29D, purple dots—small dots).

### REFERENCES

[0389] 1. K. Karikó, H. Muramatsu, J. Ludwig, D. Weissman, Generating the optimal mRNA for therapy: HPLC purification eliminates immune activation and improves translation of nucleoside-modified, protein-encoding mRNA. Nucleic Acids Res. 39, e142 (2011).
[0390] 2. V. Presnyak, N. Alhusaini, Y.-H. Chen, S. Martin, N. Morris, N. Kline, S. Olson, D. Weinberg, K. E. Baker, B. R. Graveley, J. Coller, Codon optimality is a major determinant of mRNA stability. Cell. 160, 1111-1124 (2015).
[0391] 3. A. N. Kuhn, M. Diken, S. Kreiter, A. Selmi, J. Kowalska, J. Jemielity, E. Darzynkiewicz, C. Huber, O. Türeci, U. Sahin, Phosphorothioate cap analogs increase stability and translational efficiency of RNA vaccines in immature dendritic cells and induce superior immune responses in vivo. Gene Ther. 17, 961-971 (2010).
[0392] 4. S. Holtkamp, S. Kreiter, A. Selmi, P. Simon, M. Koslowski, C. Huber, Ö. Türeci, U. Sahin, Modification of antigen-encoding RNA increases stability, translational efficacy, and T-cell stimulatory capacity of dendritic cells. Blood. 108 (2006), pp. 4009-4017.
[0393] 5. A. G. Orlandini von Niessen, M. A. Poleganov, C. Rechner, A. Plaschke, L. M. Kranz, S. Fesser, M. Diken, M. Lower, B. Vallazza, T. Beissert, V. Bukur, A. N. Kuhn, Ö. Türeci, U. Sahin, Improving mRNA-Based Therapeutic Gene Delivery by Expression-Augmenting 3′ UTRs Identified by Cellular Library Screening. Mol. Ther. 27, 824-836 (2019).
[0394] 6. R. A. Wesselhoeft, P. S. Kowalski, D. G. Anderson, Engineering circular RNA for potent and stable translation in eukaryotic cells. Nat. Commun. 9, 2629 (2018).
[0395] 7. S. Petkovic, S. Müller, RNA circularization strategies in vivo and in vitro. Nucleic Acids Res. 43, 2454-2465 (2015).
[0396] 8. S. Müller, B. Appel, In vitro circularization of RNA. RNA Biol. 14, 1018-1027 (2017).
[0397] 9. R. A. Wesselhoeft, P. S. Kowalski, F. C. Parker-Hale, Y. Huang, N. Bisaria, D. G. Anderson, RNA Circularization Diminishes Immunogenicity and Can Extend Translation Duration In vivo. Mol. Cell. 74, 508-520.e4 (2019).
[0398] 10. N. Abe, K. Matsumoto, M. Nishihara, Y. Nakano, A. Shibata, H. Maruyama, S. Shuto, A. Matsuda, M. Yoshida, Y. Ito, H. Abe, Rolling Circle Translation of Circular RNA in Living Human Cells. Sci. Rep. 5, 16435 (2015).
[0399] 11. X. Fan, Y. Yang, C. Chen, Z. Wang, Pervasive translation of circular RNAs driven by short IRES-like elements. bioRxiv (2020), p. 473207.
[0400] 12. T. B. Hansen, T. I. Jensen, B. H. Clausen, J. B. Bramsen, B. Finsen, C. K. Damgaard, J. Kjems, Natural RNA circles function as efficient microRNA sponges. Nature. 495, 384-388 (2013).
[0401] 13. W. R. Jeck, N. E. Sharpless, Detecting and characterizing circular RNAs. Nat. Biotechnol. 32, 453-461 (2014).
[0402] 14. S. Kameda, H. Ohno, H. Saito, Synthetic circular RNA switches and circuits that control protein expression in mammalian cells. Nucleic Acids Res. (2023), doi:10.1093/nar/gkac1252.
[0403] 15. R. Chen, S. K. Wang, J. A. Belk, L. Amaya, Z. Li, A. Cardenas, B. T. Abe, C.-K. Chen, P. A. Wender, H. Y. Chang, Engineering circular RNA for enhanced protein production. Nat. Biotechnol. (2022), doi:10.1038/s41587-022-01393-0.
[0404] 16. J. L. Litke, S. R. Jaffrey, Highly efficient expression of circular RNA aptamers in cells using autocatalytic transcripts. Nat. Biotechnol. 37, 667-675 (2019).
[0405] 17. D. Katrekar, J. Yen, Y. Xiang, A. Saha, D. Meluzzi, Y. Savva, P. Mali, Efficient in vitro and in vivo RNA editing via recruitment of endogenous ADARs using circular guide RNAs. Nature Biotechnology (2022), doi:10.1038/s41587-021-01171-4.
[0406] 18. A. Li, M. R. Tanner, C. M. Lee, A. E. Hurley, M. De Giorgi, K. E. Jarrett, T. H. Davis, A. M. Doerfler, G. Bao, C. Beeton, W. R. Lagor, AAV-CRISPR Gene Editing Is Negated by Pre-existing Immunity to Cas9. Mol. Iher. 28, 1432-1441 (2020).
[0407] 19. C. T. Charlesworth, P. S. Deshpande, D. P. Dever, J. Camarena, V. T. Lemgart, M. K. Cromer, C. A. Vakulskas, M. A. Collingwood, L. Zhang, N. M. Bode, M. A. Behlke, B. Dejene, B. Cieniewicz, R. Romano, B. J. Lesch, N. Gomez-Ospina, S. Mantri, M. Pavel-Dinu, K. I. Weinberg, M. H. Porteus, Identification of preexisting adaptive immunity to Cas9 proteins in humans. Nat. Med. 25, 249-254 (2019).
[0408] 20. N. Chaudhary, D. Weissman, K. A. Whitehead, mRNA vaccines for infectious diseases: principles, delivery and clinical translation. Nat. Rev. Drug Discov. 20, 817-838 (2021).
[0409] 21. K. S. Corbett, D. K. Edwards, S. R. Leist, O. M. Abiona, S. Boyoglu-Barnum, R. A. Gillespie, S. Himansu, A. Schtafer, C. T. Ziwawo, A. T. DiPiazza, K. H. Dinnon, S. M. Elbashir, C. A. Shaw, A. Woods, E. J. Fritch, D. R. Martinez, K. W. Bock, M. Minai, B. M. Nagata, G. B. Hutchinson, K. Wu, C. Henry, K. Bahl, D. Garcia-Dominguez, L. Ma, I. Renzi, W.-P. Kong, S. D. Schmidt, L. Wang, Y. Zhang, E. Phung, L. A. Chang, R. J. Loomis, N. E. Altaras, E. Narayanan, M. Metkar, V. Presnyak, C. Liu, M. K. Louder, W. Shi, K. Leung, E. S. Yang, A. West, K. L. Gully, L. J. Stevens, N. Wang, D. Wrapp, N. A. Doria-Rose, G. Stewart-Jones, H. Bennett, G. S. Alvarado, M. C. Nason, T. J. Ruckwardt, J. S. McLellan, M. R. Denison, J. D. Chappell, I. N. Moore, K. M. Morabito, J. R. Mascola, R. S. Baric, A. Carfi, B. S. Graham, SARS-CoV-2 mRNA vaccine design enabled by prototype pathogen preparedness. Nature. 586, 567-571 (2020).
[0410] 22. K. O. Saunders, E. Lee, R. Parks, D. R. Martinez, D. Li, H. Chen, R. J. Edwards, S. Gobeil, M. Barr, K. Mansouri, S. M. Alam, L. L. Sutherland, F. Cai, A. M. Sanzone, M. Berry, K. Manne, K. W. Bock, M. Minai, B. M. Nagata, A. B. Kapingidza, M. Azoitei, L. V. Tse, T. D. Scobey, R. L. Spreng, R. W. Rountree, C. T. DeMarco, T. N. Denny, C. W. Woods, E. W. Petzold, J. Tang, T. H. Oguin 3rd, G. D. Sempowski, M. Gagne, D. C. Douek, M. A. Tomai, C. B. Fox, R. Seder, K. Wiehe, D. Weissman, N. Pardi, H. Golding, S. Khurana, P. Acharya, H. Andersen, M. G. Lewis, I. N. Moore, D. C. Montefiori, R. S. Baric, B. F. Haynes, Neutralizing antibody vaccine for pandemic and pre-emergent coronaviruses. Nature. 594, 553-559 (2021).
[0411] 23. S. J. Thomas, J. L. Perez, S. P. Lockhart, S. Hariharan, N. Kitchin, R. Bailey, K. Liau, E. Lagkadinou, Ö. Türeci, U. Sahin, X. Xu, K. Koury, S. S. Dychter, C. Lu, T. C. Gentile, W. C. Gruber, Efficacy and safety of the BNT162b2 mRNA COVID-19 vaccine in participants with a history of cancer: subgroup analysis of a global phase 3 randomized clinical trial. Vaccine (2021), doi:10.1016/j.vaccine.2021.12.046.
[0412] 24. L. V. Zinsli, N. Stierlin, M. J. Loessner, M. Schmelcher, Deimmunization of protein therapeutics—Recent advances in experimental and computational epitope prediction and deletion. Computational and Structural Biotechnology Journal. 19 (2021), pp. 315-329.
[0413] 25. C. Y. Chen, P. Samow, Initiation of protein synthesis by the eukaryotic translational apparatus on circular RNAs. Science. 268, 415-417 (1995).
[0414] 26. S. K. Jang, H. G. Krausslich, M. J. Nicklin, G. M. Duke, A. C. Palmenberg, E. Wimmer, A segment of the 5′ nontranslated region of encephalomyocarditis virus RNA directs internal entry of ribosomes during in vitro translation. Journal of Virology. 62 (1988), pp. 2636-2643.
[0415] 27. C. E. Aitken, J. R. Lorsch, A mechanistic overview of translation initiation in eukaryotes. Nat. Struct. Mol. Biol. 19, 568-576 (2012).
[0416] 28. G. Alkemar, O. Nygird, Secondary structure of two regions in expansion segments ES3 and ES6 with the potential of forming a tertiary interaction in eukaryotic 40S ribosomal subunits. RNA. 10, 403-411 (2004).
[0417] 29. P. Bhat, S. Shwetha, D. K. Sharma, A. P. Joseph, N. Srinivasan, S. Das, The beta hairpin structure within ribosomal protein S5 mediates interplay between domains II and IV and regulates HCV IRES function. Nucleic Acids Res. 43, 2888-2901 (2015).
[0418] 30. J. Chen, A.-D. Brunner, J. Z. Cogan, J. K. Nuflez, A. P. Fields, B. Adamson, D. N. Itzhak, J. Y. Li, M. Mann, M. D. Leonetti, J. S. Weissman, Pervasive functional translation of noncanonical human open reading frames. Science. 367, 1140-1146 (2020).
[0419] 31. J. W. B. Hershey, N. Sonenberg, M. B. Mathews, Principles of translational control: an overview. Cold Spring Harb. Perspect. Biol. 4 (2012), doi:10.1101/cshperspect.a011528.
[0420] 32. Y. G. Chen, R. Chen, S. Ahmad, R. Verma, S. P. Kasturi, L. Amaya, J. P. Broughton, J. Kim, C. Cadena, B. Pulendran, S. Hur, H. Y. Chang, N6-Methyladenosine Modification Controls Circular RNA Immunity. Mol. Cell. 76, 96-109.e9 (2019).
[0421] 33. H. Steinle, A. Behring, C. Schlensak, H. P. Wendel, M. Avci-Adali, Concise Review: Application of In vitro Transcribed Messenger RNA for Cellular Engineering and Reprogramming: Progress and Challenges. Stem Cells. 35, 68-79 (2017).
[0422] 34. L. Warren, P. D. Manos, T. Ahfeldt, Y.-H. Loh, H. Li, F. Lau, W. Ebina, P. K. Mandal, Z. D. Smith, A. Meissner, G. Q. Daley, A. S. Brack, J. J. Collins, C. Cowan, T. M. Schlaeger, D. J. Rossi, Highly efficient reprogramming to pluripotency and directed differentiation of human cells with synthetic modified mRNA. Cell Stem Cell. 7, 618-630 (2010).
[0423] 35. J. Yang, S. S. Rajan, M. J. Friedrich, G. Lan, X. Zou, H. Ponstingl, D. A. Garyfallos, P. Liu, A. Bradley, E. Metzakopian, Genome-Scale CRISPRa Screen Identifies Novel Factors for Cellular Reprogramming. Stem Cell Reports. 12, 757-771 (2019).
[0424] 36. M. Jayaraman, S. M. Ansell, B. L. Mui, Y. K. Tam, J. Chen, X. Du, D. Butler, L. Eltepu, S. Matsuda, J. K. Narayanannair, K. G. Rajeev, I. M. Hafez, A. Akinc, M. A. Maier, M. A. Tracy, P. R. Cullis, T. D. Madden, M. Manoharan, M. J. Hope, Maximizing the potency of siRNA lipid nanoparticles for hepatic gene silencing in vivo. Angew. Chem. Int. Ed Engl. 51, 8529-8533 (2012).
[0425] 37. S. Sabnis, E. S. Kumarasinghe, T. Salerno, C. Mihai, T. Ketova, J. J. Senn, A. Lynn, A. Bulychev, I. McFadyen, J. Chan, Ö. Almarsson, M. G. Stanton, K. E. Benenato, A Novel Amino Lipid Series for mRNA Delivery: Improved Endosomal Escape and Sustained Pharmacology and Safety in Non-human Primates. Mol. Ther. 26, 1509-1519 (2018).
[0426] 38. A. Lombardo, P. Genovese, C. M. Beausejour, S. Colleoni, Y.-L. Lee, K. A. Kim, D. Ando, F. D. Umov, C. Galli, P. D. Gregory, M. C. Holmes, L. Naldini, Gene editing in human stem cells using zinc finger nucleases and integrase-defective lentiviral vector delivery. Nat. Biotechnol. 25, 1298-1306 (2007).
[0427] 39. J. Zou, M. L. Maeder, P. Mali, S. M. Pruett-Miller, S. Thibodeau-Beganny, B.-K. Chou, G. Chen, Z. Ye, I.-H. Park, G. Q. Daley, M. H. Porteus, J. K. Joung, L. Cheng, Gene targeting of a disease-related gene in human induced pluripotent stem and embryonic stem cells. Cell Stem Cell. 5, 97-110 (2009).
[0428] 40. M. Abifadel, M. Varret, J.-P. Rab s, D. Allard, K. Ouguerram, M. Devillers, C. Cruaud, S. Benjannet, L. Wickham, D. Erlich, A. Derrd, L. Villdger, M. Famier, I. Beucler, E. Bruckert, J. Chambaz, B. Chanu, J.-M. Lecerf, G. Luc, P. Moulin, J. Weissenbach, A. Prat, M. Krempf, C. Junien, N. G. Seidah, C. Boileau, Mutations in PCSK9 cause autosomal dominant hypercholesterolemia. Nat. Genet. 34, 154-156 (2003).
[0429] 41. K. N. Maxwell, J. L. Breslow, Adenoviral-mediated expression of Pcsk9 in mice results in a low-density lipoprotein receptor knockout phenotype. Proc. Natl. Acad. Sci. U.S.A 101, 7100-7105 (2004).
[0430] 42. J. C. Cohen, E. Boerwinkle, T. H. Mosley Jr, H. H. Hobbs, Sequence variations in PCSK9, low LDL, and protection against coronary heart disease. N. Engl. J. Med. 354, 1264-1272 (2006).
[0431] 43. P. I. Thakore, J. B. Kwon, C. E. Nelson, D. C. Rouse, M. P. Gemberling, M. L. Oliver, C. A. Gersbach, RNA-guided transcriptional silencing in vivo with S. aureus CRISPR-Cas9 repressors. Nat. Commun. 9, 1674 (2018).
[0432] 44. F. A. Ran, L. Cong, W. X. Yan, D. A. Scott, J. S. Gootenberg, A. J. Kriz, B. Zetsche, O. Shalem, X. Wu, K. S. Makarova, E. V. Koonin, P. A. Sharp, F. Zhang, In vivo genome editing using Staphylococcus aureus Cas9. Nature. 520, 186-191 (2015).
[0433] 45. N.-Y. He, Q. Li, C.-Y. Wu, Z. Ren, Y. Gao, L.-H. Pan, M.-M. Wang, H.-Y. Wen, Z.-S. Jiang, Z.-H. Tang, L.-S. Liu, Lowering serum lipids via PCSK9-targeting drugs: current advances and future perspectives. Acta Pharmacol. Sin. 38, 301-311 (2017).
[0434] 46. P. M. Ridker, J. Revkin, P. Amarenco, R. Brunell, M. Curto, F. Civeira, M. Flather, R. J. Glynn, J. Gregoire, J. W. Jukema, Y. Karpov, J. J. P. Kastelein, W. Koenig, A. Lorenzatti, P. Manga, U. Masiukiewicz, M. Miller, A. Mosterd, J. Murin, J. C. Nicolau, S. Nissen, P. Ponikowski, R. D. Santos, P. F. Schwartz, H. Soran, H. White, R. S. Wright, M. Vrablik, C. Yunis, C. L. Shear, J.-C. Tardif, SPIRE Cardiovascular Outcome Investigators, Cardiovascular Efficacy and Safety of Bococizumab in High-Risk Patients. N. Engl. J. Med. 376, 1527-1539 (2017).
[0435] 47. M. S. Sabatine, R. P. Giugliano, A. C. Keech, N. Honarpour, S. D. Wiviott, S. A. Murphy, J. F. Kuder, H. Wang, T. Liu, S. M. Wasserman, P. S. Sever, T. R. Pedersen, FOURIER Steering Committee and Investigators, Evolocumab and Clinical Outcomes in Patients with Cardiovascular Disease. N. Engl. J. Med. 376, 1713-1722 (2017).
[0436] 48. K. Fitzgerald, S. White, A. Borodovsky, B. R. Bettencourt, A. Strahs, V. Clausen, P. Wijngaard, J. D. Horton, J. Taubel, A. Brooks, C. Fernando, R. S. Kauffman, D. Kallend, A. Vaishnaw, A. Simon, A Highly Durable RNAi Therapeutic Inhibitor of PCSK9. N. Engl. J. Med. 376, 41-51 (2017).
[0437] 49. Q. Ding, A. Strong, K. M. Patel, S.-L. Ng, B. S. Gosis, S. N. Regan, C. A. Cowan, D. J. Rader, K. Musunuru, Permanent alteration of PCSK9 with in vivo CRISPR-Cas9 genome editing. Circ. Res. 115, 488-492 (2014).
[0438] 50. A. M. Moreno, N. Palmer, F. Alemkn, G. Chen, A. Pla, N. Jiang, W. L. Chew, M. Law, P. Mali, Author Correction: Immune-orthogonal orthologues of AAV capsids and of Cas9 circumvent the immune response to the administration of gene therapy. Nat Biomed Eng. 3, 842 (2019).
[0439] 51. W. L. Chew, M. Tabebordbar, J. K. W. Cheng, P. Mali, E. Y. Wu, A. H. M. Ng, K. Zhu, A. J. Wagers, G. M. Church, A multifunctional AAV-CRISPR-Cas9 and its host response. Nat. Methods. 13, 868-874 (2016).
[0440] 52. V. Jawa, F. Terry, J. Gokemeijer, S. Mitra-Kaushik, B. J. Roberts, S. Tourdot, A. S. De Groot, T-Cell Dependent Immunogenicity of Protein Therapeutics Pre-clinical Assessment and Mitigation-Updated Consensus and Review 2020. Frontiers in Immunology. 11 (2020), doi:10.3389/fimmu.2020.01301.
[0441] 53. F. Moghadam, R LeGraw, J. J. Velazquez, N. C. Yeo, C. Xu, J. Park, A. Chavez, M. R. Ebrahimkhani, S. Kiani, Synthetic immunomodulation with a CRISPR super-repressor in vivo. Nat. Cell Biol. 22, 1143-1154 (2020).
[0442] 54. S. R Ferdosi, R Ewaisha, F. Moghadam, S. Krishna, J. G. Park, M. R Ebrahimkhani, S. Kiani, K. S. Anderson, Multifunctional CRISPR-Cas9 with engineered immunosilenced human T cell epitopes. Nat. Commun. 10, 1842 (2019).
[0443] 55. B. D. Allen, A. Nisthal, S. L. Mayo, Experimental library screening demonstrates the successful application of computational protein design to large structural ensembles. Proc. Natl. Acad. Sci. U.S.A 107, 19838-19843 (2010).
[0444] 56. M. G. F. Sun, M.-H. Seo, S. Nim, C. Corbi-Verge, P. M. Kim, Protein engineering by highly parallel screening of computationally designed variants. Sci Adv. 2, e1600692 (2016).
[0445] 57. J. Cao, E. M. Novoa, Z. Zhang, W. C. W. Chen, D. Liu, G. C. G. Choi, A. S. L. Wong, C. Wehrspaun, M. Kellis, T. K. Lu, High-throughput 5′ UTR engineering for enhanced protein production in non-viral gene therapies. Nat. Commun. 12, 1-10 (2021).
[0446] 58. J. H. Hu, S. M. Miller, M. H. Geurts, W. Tang, L. Chen, N. Sun, C. M. Zeina, X. Gao, H. A. Rees, Z. Lin, D. R Liu, Evolved Cas9 variants with broad PAM compatibility and high DNA specificity. Nature. 556, 57-63 (2018).
[0447] 59. R T. Walton, K. A. Christie, M. N. Whittaker, B. P. Kleinstiver, Unconstrained genome targeting with near-PAMless engineered CRISPR-Cas9 variants. Science. 368, 290-296 (2020).
[0448] 60. B. P. Kleinstiver, M. S. Prew, S. Q. Tsai, V. V. Topkar, N. T. Nguyen, Z. Zheng, A. P. W. Gonzales, Z. Li, R. T. Peterson, J.-R J. Yeh, M. J. Aryee, J. K. Joung, Engineered CRISPR-Cas9 nucleases with altered PAM specificities. Nature. 523, 481-485 (2015).
[0449] 61. B. P. Kleinstiver, V. Pattanayak, M. S. Prew, S. Q. Tsai, N. T. Nguyen, Z. Zheng, J. K. Joung, High-fidelity CRISPR-Cas9 nucleases with no detectable genome-wide off-target effects. Nature. 529, 490-495 (2016).
[0450] 62. E. J. Charles, S. E. Kim, G. J. Knott, D. Smock, J. Doudna, D. F. Savage, Engineering improved Cas13 effectors for targeted post-transcriptional regulation of gene expression. bioRxiv (2021), p. 2021.05.26.445687.
[0451] 63. K. E. Griswold, C. Bailey-Kellogg, Design and engineering of deimmunized biotherapeutics. Curr. Opin. Struct. Biol. 39, 79-88 (2016).
[0452] 64. M. B. Doud, J. M. Lee, J. D. Bloom, How single mutations affect viral escape from broad and narrow antibodies to H1 influenza hemagglutinin. Nat. Commun. 9, 1386 (2018).
[0453] 65. G. Gasiunas, J. K. Young, T. Karvelis, D. Kazlauskas, T. Urbaitis, M. Jasnauskaite, M. M. Grusyte, S. Paulraj, P.-H. Wang, Z. Hou, S. K. Dooley, M. Cigan, C. Alarcon, N. D. Chilcoat, G. Bigelyte, J. L. Curcuru, M. Mabuchi, Z. Sun, R. T. Fuchs, E. Schildkraut, P. R. Weigele, W. E. Jack, G. B. Robb, C. Venclovas, V. Siksnys, A catalogue of biochemically diverse CRISPR-Cas9 orthologs. Nat. Commun. 11, 5512 (2020).
[0454] 66. N. Takeuchi, Y. I. Wolf, K. S. Makarova, E. V. Koonin, Nature and intensity of selection pressure on CRISPR-associated genes. J. Bacteriol. 194, 1216-1225 (2012).
[0455] 67. M. Andreatta, M. Nielsen, Gapped sequence alignment using artificial neural networks: application to the MHC class I system. Bioinformatics. 32, 511-517 (2016).
[0456] 68. M. Nielsen, C. Lundegaard, P. Woming, S. L. Lauemoller, K. Lamberth, S. Buus, S. Brunak, O. Lund, Reliable prediction of T-cell epitopes using neural networks with novel sequence representations. Protein Sci. 12, 1007-1017 (2003).
[0457] 69. D. C. Osipovitch, A. S. Parker, C. D. Makokha, J. Desrosiers, W. C. Kett, L. Moise, C. Bailey-Kellogg, K. E. Griswold, Design and analysis of immune-evading enzymes for ADEPT therapy. Protein Eng. Des. Sel. 25, 613-623 (2012).
[0458] 70. Y. Choi, D. Verma, K. E. Griswold, C. Bailey-Kellogg, “EpiSweep: Computationally Driven Reengineering of Therapeutic Proteins to Reduce Immunogenicity While Maintaining Function” in Computational Protein Design, I. Samish, Ed. (Springer New York, New York, NY, 2017), pp. 375-398.
[0459] 71. C. King, E. N. Garza, R. Mazor, J. L. Linehan, I. Pastan, M. Pepper, D. Baker, Removing T-cell epitopes with computational protein design. Proc. Natl. Acad. Sci. U.S.A 111, 8577-8582 (2014).
[0460] 72. R. Mazor, D. Crown, S. Addissie, Y. Jang, G. Kaplan, I. Pastan, Elimination of murine and human T-cell epitopes in recombinant immunotoxin eliminates neutralizing and anti-drug antibodies in vivo. Cell. Mol. Immunol. 14, 432-442 (2017).
[0461] 73. Y. Wang, Y. Zhao, A. Bollas, Y. Wang, K. F. Au, Nanopore sequencing technology, bioinformatics and applications. Nat. Biotechnol. 39, 1348-1365 (2021).
[0462] 74. F. J. Rang, W. P. Kloosterman, J. de Ridder, From squiggle to basepair: computational approaches for improving nanopore sequencing read accuracy. Genome Biol. 19, 90 (2018).
[0463] 75. B. Schubert, C. Scharfe, P. Dönnes, T. Hopf, D. Marks, O. Kohlbacher, Population-specific design of de-immunized protein biotherapeutics. PLoS Comput. Biol. 14, e1005983 (2018).
[0464] 76. S. Liao, M. Tammaro, H. Yan, Enriching CRISPR-Cas9 targeted cells by co-targeting the HPRT gene. Nucleic Acids Res. 43, e134 (2015).
[0465] 77. F. Yang, H. Fang, D. Wang, Y. Chen, Y. Zhai, B.-B. S. Zhou, H. Li, HPRT1 activity loss is associated with resistance to thiopurine in ALL. Oncotarget. 9, 2268-2278 (2018).
[0466] 78. M.-R. Meini, P. E. Tomatis, D. M. Weinreich, A. J. Vila, Quantitative Description of a Protein Fitness Landscape Based on Molecular Features. Mol. Biol. Evol. 32, 1774-1787 (2015).
[0467] 79. P. Mali, L. Yang, K. M. Esvelt, J. Aach, M. Guell, J. E. DiCarlo, J. E. Norville, G. M. Church, RNA-guided human genome engineering via Cas9. Science. 339, 823-826 (2013).
[0468] 80. K. Clement, H. Rees, M. C. Canver, J. M. Gehrke, R. Farouni, J. Y. Hsu, M. A. Cole, D. R. Liu, J. K. Joung, D. E. Bauer, L. Pinello, CRISPResso2 provides accurate and rapid genome editing sequence analysis. Nat. Biotechnol. 37, 224-226 (2019).
[0469] 81. T. Ninkovic, L. Kinarsky, K. Engelmann, V. Pisarev, S. Sherman, O. J. Finn, F.-G. Hanisch, Identification of O-glycosylated decapeptides within the MUC1 repeat domain as potential MHC class I (A2) binding epitopes. Mol. Immunol. 47, 131-140 (2009).
[0470] 82. J. K. Etschel, A. G. Hilckelhoven, C. Hofmann, K. Zitzelsberger, K. Maurer, S. Bergmann, S. M. Mueller-Schmucker, J. Wittmann, B. M. Spriewald, J. Dörrie, N. Schaft, T. Harrer, HIV-1 mRNA electroporation of PBMC: a simple and efficient method to monitor T-cell responses against autologous HIV-1 in HIV-1-infected patients. J. Immunol. Methods. 380, 40-55 (2012).
[0471] 83. K. Van Camp, N. Cools, B. Stein, A. Van de Velde, H. Goossens, Z. N. Bememan, V. Van Tendeloo, Efficient mRNA electroporation of peripheral blood mononuclear cells to detect memory T cell responses for immunomonitoring purposes. J. Immunol. Methods. 354, 1-10 (2010).
[0472] 84. A. M. Moreno, X. Fu, J. Zhu, D. Katrekar, Y.-R. V. Shih, J. Marlett, J. Cabotaje, J. Tat, J. Naughton, L. Lisowski, S. Varghese, K. Zhang, P. Mali, In situ Gene Therapy via AAV-CRISPR-Cas9-Mediated Targeted Gene Regulation. Mol. Ther. 28, 1931 (2020).
[0473] 85. J. K. Nufnez, J. Chen, G. C. Pommier, J. Z. Cogan, J. M. Replogle, C. Adriaens, G. N. Ramadoss, Q. Shi, K. L. Hung, A. J. Samelson, A. N. Pogson, J. Y. S. Kim, A. Chung, M. D. Leonetti, H. Y. Chang, M. Kampmann, B. E. Bernstein, V. Hovestadt, L. A. Gilbert, J. S. Weissman, Genome-wide programmable transcriptional memory by CRISPR-based epigenome editing. Cell. 184, 2503-2519.e17 (2021).
[0474] 86. A. Amabile, A. Migliara, P. Capasso, M. Biffi, D. Cittaro, L. Naldini, A. Lombardo, Inheritable Silencing of Endogenous Genes by Hit-and-Run Targeted Epigenetic Editing. Cell. 167, 219-232.e14 (2016).
[0475] 87. C.-K. Chen, R. Cheng, J. Demeter, J. Chen, S. Weingarten-Gabbay, L. Jiang, M. P. Snyder, J. S. Weissman, E. Segal, P. K. Jackson, H. Y. Chang, Structured elements drive extensive circular RNA translation. Mol. Cell. 81, 4300-4318.e13 (2021).
[0476] 88. Y. Yang, X. Fan, M. Mao, X. Song, P. Wu, Y. Zhang, Y. Jin, Y. Yang, L.-L. Chen, Y. Wang, C. C. Wong, X. Xiao, Z. Wang, Extensive translation of circular RNAs driven by N6-methyladenosine. Cell Res. 27, 626-641 (2017).
[0477] 89. K. D. Meyer, D. P. Patil, J. Zhou, A. Zinoviev, M. A. Skabkin, O. Elemento, T. V. Pestova, S.-B. Qian, S. R. Jaffrey, 5′ UTR m6A Promotes Cap-Independent Translation. Cell. 163, 999-1010 (2015).
[0478] 90. S. Weingarten-Gabbay, S. Elias-Kirma, R. Nir, A. A. Gritsenko, N. Stem-Ginossar, Z. Yakhini, A. Weinberger, E. Segal, Comparative genetics. Systematic discovery of cap-independent translation sequences in human and viral genomes. Science. 351 (2016), doi:10.1126/science.aad4939.
[0479] 91. P. J. Sample, B. Wang, D. W. Reid, V. Presnyak, I. J. McFadyen, D. R. Morris, G. Seelig, Human 5′ UTR design and variant effect prediction from a massively parallel translation assay. Nat. Biotechnol. 37, 803-809 (2019).
[0480] 92. Y. G. Chen, M. V. Kim, X. Chen, P. J. Batista, S. Aoyama, J. E. Wilusz, A. Iwasaki, H. Y. Chang, Sensing Self and Foreign Circular RNAs by Intron Identity. Mol. Cell. 67, 228-238.e5 (2017).
[0481] 93. B. T. Abe, R. Alexander Wesselhoeft, R. Chen, D. G. Anderson, H. Y. Chang, Circular RNA migration in agarose gel electrophoresis. Molecular Cell (2022), doi:10.1016/j.molcel.2022.03.008.
[0482] 94. M. A. Stiffler, F. J. Poelwijk, K. P. Brock, R. R. Stein, A. Riesselman, J. Teyra, S. S. Sidhu, D. S. Marks, N. P. Gauthier, C. Sander, Protein Structure from Experimental Evolution. Cell Syst. 10, 15-24.e5 (2020).
[0483] 95. A. G. Green, H. Elhabashy, K. P. Brock, R. Maddamsetti, O. Kohlbacher, D. S. Marks, Large-scale discovery of protein interactions at residue resolution using co-evolution calculated from genomic sequences. Nature Communications. 12 (2021), doi:10.1038/s41467-021-21636-z.
[0484] 96. K. Saylor, F. Gillam, T. Lohneis, C. Zhang, Designs of Antigen Structure and Composition for Improved Protein-Based Vaccine Efficacy. Front. Immunol. 11, 283 (2020).
[0485] 97. A. V. Joglekar, M. T. Leonard, J. D. Jeppson, M. Swift, G. Li, S. Wong, S. Peng, J. M. Zaretsky, J. R. Heath, A. Ribas, M. T. Bethune, D. Baltimore, T cell antigen discovery via signaling and antigen-presenting bifunctional receptors. Nat. Methods. 16, 191-198 (2019).
[0486] 98. X. Lian, J. Zhang, S. M. Azarin, K. Zhu, L. B. Hazeltine, X. Bao, C. Hsiao, T. J. Kamp, S. P. Palecek, Directed cardiomyocyte differentiation from human pluripotent stem cells by modulating Wnt/β-catenin signaling under fully defined conditions. Nat. Protoc. 8, 162-175 (2013).
[0487] 99. A. Kumar, S. K. Thomas, K. C. Wong, V. Lo Sardo, D. S. Cheah, Y.-H. Hou, J. K. Placone, K. P. Tenerelli, W. C. Ferguson, A. Torkamani, E. J. Topol, K. K. Baldwin, A. J. Engler, Mechanical activation of noncoding-RNA-mediated regulation of disease-associated phenotypes in human cardiomyocytes. Nat Biomed Eng. 3, 137-146 (2019).

[0488] 100. D. Chen, K. T. Love, Y. Chen, A. A. Eltoukhy, C. Kastrup, G. Sahay, A. Jeon, Y. Dong, K. A. Whitehead, D. G. Anderson, Rapid discovery of potent siRNA-containing lipid nanoparticles enabled by controlled microfluidic formulation. J. Am. Chem. Soc. 134, 6948-6951 (2012).

[0489] 101. N. M. Belliveau, J. Huft, P. J. Lin, S. Chen, A. K. Leung, T. J. Leaver, A. W. Wild, J. B. Lee, R. J. Taylor, Y. K. Tam, C. L. Hansen, P. R. Cullis, Microfluidic Synthesis of Highly Potent Limit-size Lipid Nanoparticles for In vivo Delivery of siRNA. Mol. Ther. Nucleic Acids. 1, e37 (2012).

[0490] It will be understood that various modifications may be made without departing from the spirit and scope of this disclosure. Accordingly, other embodiments are within the scope of the following claims.

What is claimed is:

1. A linearized ribozyme activated RNA construct comprising from 5′ to 3′ end:
(a) a first ligation sequence;
(b) an IRES sequence;
(c) a polynucleotide sequence of interest encoding a recombinant polypeptide;
(d) a 3′ UTR sequence;
(e) a poly(A) sequence; and
(f) a second ligation sequence,
wherein the first ligation sequence comprises a 5′-OH end, the second ligation sequence comprises a 2′, 3′-cyclic phosphate end,
wherein the first and second ligation sequences form a stem substrate for an RNA ligase.

2. The linearized ribozyme activated RNA construct of claim 1, wherein the IRES sequence is selected from the group consisting of a cricket paralysis virus IRES (SEQ ID NO: 1330), a Homo sapiens IGF2 IRES (SEQ ID NO: 1331), a hepatovirus A IRES (SEQ ID NO: 1332), a hepatitis C virus H77 isolate IRES (SEQ ID NO: 1333), a Homo sapiens FGF1 IRES (SEQ ID NO: 1334), a bovine viral diarrhea virus 1 IRES (SEQ ID NO: 1335), a human rhinovirus A89 IRES (SEQ ID NO: 1336), a pan paniscus LIMA1 (SEQ ID NO: 1337), a human adenovirus 2 IRES (SEQ ID NO: 1338), a Montana myotis leukoencephalitis virus IRES (SEQ ID NO: 1339), a Homo sapiens RANBP3 IRES (SEQ ID NO: 1340), a pestivirus giraffe 1 IRES (SEQ ID NO: 1341), a Homo sapiens TGIF1 IRES (SEQ ID NO: 1342), a human poliovirus 1 mahoney IRES (SEQ ID NO: 1343), a foot-and-mouth disease virus type O IRES (SEQ ID NO: 1344), an encephalomyocarditis virus 7A IRES (SEQ ID NO: 1345), an encephalomyocarditis virus 6A IRES (SEQ ID NO: 1346), an enterovirus 71 IRES (SEQ ID NO: 1347), and a coxsackievirus B3 IRES (SEQ ID NO: 1348), wherein the T nucleotides are U nucleotides in the RNA construct.

3. The linearized ribozyme activated RNA construct of claim 1 or 2, wherein the 3′ UTR sequence is selected from the group consisting of an mtRNR1-AES 3′ UTR (SEQ ID NO: 1354), an mtRNR1-LSP1 3′ UTR (SEQ ID NO: 1355), an AES-mtRNR1 3′ UTR (SEQ ID NO: 1356), an AES-hBg 3′ UTR (SEQ ID NO: 1357), an FCGRT-hBg 3′ UTR (SEQ ID NO: 1358), a 2hBg 3′ UTR (SEQ ID NO: 1359), and a HBA1 3′ UTR (SEQ ID NO: 1360), wherein the T nucleotides are U nucleotides in the RNA construct.

4. The linearized ribozyme activated RNA construct of any one of claims 1-3, wherein the 3′ UTR sequence further comprises a WPRE sequence.

5. The linearized ribozyme activated RNA construct of claim 4, wherein the WPRE sequence comprises the nucleic acid sequence of SEQ ID NO: 1353.

6. The linearized ribozyme activated RNA construct of claim 4 or 5, wherein the poly(A) sequence positioned 3′ of the WPRE sequence.

7. The linearized ribozyme activated RNA construct of any one of claims 1-6, wherein the poly(A) sequence has a length ranging from about 5 to about 1000 adenine nucleotides.

8. The linearized ribozyme activated RNA construct of any one of claims 1-7, wherein the poly(A) sequence has a length ranging from about 5 to about 300 adenine nucleotides.

9. The linearized ribozyme activated RNA construct of any one of claims 1-8, wherein a portion of the first ligation sequence is complementary to a portion of the second ligation sequence.

10. The linearized ribozyme activated RNA construct of any one of claims 1-9, wherein the first and/or the second ligation sequence comprises a nucleic acid sequence having at least 90% sequence identity of 5′-AACCAUGCCGACUGAUGGCAG-3′ (SEQ ID NO: 1413).

11. The linearized ribozyme activated RNA construct of any one of claims 1-10, wherein the first and/or the second ligation sequence comprises a nucleic acid sequence having at least 90% sequence identity of 5′-CUGCCAUCAGUCGGCGUGGACUGUAG-3′ (SEQ ID NO: 1415).

12. The linearized ribozyme activated RNA construct of any one of claims 1-11, wherein the construct lacks a ribozyme.

13. The linearized ribozyme activated RNA construct of any one of claims 1-12, wherein the construct comprises one or more modified nucleic acids.

14. The linearized ribozyme activated RNA construct of any one of claims 1-13, wherein the construct capable of being introduced into a cell.

15. The linearized ribozyme activated RNA construct of any one of claims 1-13, wherein the construct has been introduced into a cell.

16. An engineered cell comprising any one of the linearized ribozyme activated RNA constructs of any one of claims 1-13.

17. The engineered cell of claim 16, further comprising a circular RNA construct formed from the linearized ribozyme activated RNA construct.

18. The engineered cell of claim 16 or 17, wherein the cell lacks a DNA construct encoding the linearized ribozyme activated RNA construct.

19. The engineered cell of any one of claims 16-18, wherein the cell is a eukaryotic cell.

20. The engineered cell of claim 19, wherein the eukaryotic cell is a mammalian cell.

21. The engineered cell of claim 20, wherein the mammalian cell is a human cell.

22. A method for producing an engineered cell comprising a circular RNA comprising: introducing the linearized ribozyme activated RNA construct of any one of claims 1-13 into the cell, wherein an RNA ligase in the cell ligates the first and second ligation sequences, thereby forming the circular RNA construct.

23. The method of claim 22, wherein the RNA ligase is an endogenous RtcB ligase.

24. The method of claim 22 or 23, wherein the cell is a eukaryotic cell.

25. The method of claim 24, wherein the eukaryotic cell is a mammalian cell.

26. The method of claim 25, wherein the mammalian cell is a human cell.

27. A method for producing a circular RNA construct comprising contacting the linearized ribozyme activated RNA construct of any one of claims 1-13 with an RNA ligase.

28. The method of claim 27, wherein the contacting is in vitro.

29. The method of claim 27, wherein the contacting is inside a cell.

30. A composition comprising the linearized ribozyme activated RNA construct of any one of claims 1-13 and a delivery system.

31. The composition of claim 30, wherein the delivery system comprises any one selected from the group consisting of a lipid nanoparticle, a liposome, a charged polymer, an uncharged polymer, a nanoparticle, a surfactant, a penetrating enhancer, a gene transfer agent, a phospholipid, a micelle, a synthetic vector, a macromolecule, a dendrimer, a biopolymer, a viral particle, and any combination thereof.

32. The composition of claim 30 or 31, wherein the composition is administered to a subject.

33. The composition of claim 32, wherein the subject is a human subject.

34. A therapeutic composition comprising the linearized ribozyme activated RNA construct of any one of claims 1-13 and a lipid nanoparticle, wherein the lipid nanoparticle comprises: (6Z,9Z,28Z,31Z)-heptatriaconta-6,9,28,31-tetraen-19-yl-4-(dimethylamino) butanoate (DLin-MC3-DMA); cholesterol; 1,2-distearoyl-sn-glycero-3-phosphocholine (DSPC); and 1,2-dimyristoyl-rac-glycero-3-methoxypolyethylene glycol-2000 (DMG-PEG-2000) at a mole ratio of 50:38.5:10:1.5, respectively, and the lipid nanoparticle has an N/P ratio of 5.4.

35. A linearized ribozyme-RNA construct comprising from 5′ to 3′ end:
(a) a first twister ribozyme;
(b) a first ligation sequence;
(c) an IRES sequence;
(d) a polynucleotide sequence of interest encoding a recombinant polypeptide;
(e) a 3′ UTR sequence;
(f) a poly(A) sequence;
(g) a second ligation sequence; and
(h) a second twister ribozyme.

36. The linearized ribozyme-RNA construct of claim 35, wherein the IRES sequence is selected from the group consisting of a cricket paralysis virus IRES (SEQ ID NO: 1330), a Homo sapiens IGF2 IRES (SEQ ID NO: 1331), a hepatovirus A IRES (SEQ ID NO: 1332), a hepatitis C virus H77 isolate IRES (SEQ ID NO: 1333), a Homo sapiens FGF1 IRES (SEQ ID NO: 1334), a bovine viral diarrhea virus 1 IRES (SEQ ID NO: 1335), a human rhinovirus A89 IRES (SEQ ID NO: 1336), a pan paniscus LIMA1 (SEQ ID NO: 1337), a human adenovirus 2 IRES (SEQ ID NO: 1338), a Montana myotis leukoencephalitis virus IRES (SEQ ID NO: 1339), a Homo sapiens RANBP3 IRES (SEQ ID NO: 1340), a pestivirus giraffe 1 IRES (SEQ ID NO: 1341), a Homo sapiens TGIF1 IRES (SEQ ID NO: 1342), a human poliovirus 1 mahoney IRES (SEQ ID NO: 1343), a foot-and-mouth disease virus type O IRES (SEQ ID NO: 1344), an encephalomyocarditis virus 7A IRES (SEQ ID NO: 1345), an encephalomyocarditis virus 6A IRES (SEQ ID NO: 1346), an enterovirus 71 IRES (SEQ ID NO: 1347), and a coxsackievirus B3 IRES (SEQ ID NO: 1348), wherein the T nucleotides are U nucleotides in the linearized ribozyme-RNA construct.

37. The linearized ribozyme-RNA construct of claim 35 or 36, wherein the 3′ UTR sequence is selected from the group consisting of an mtRNR1-AES 3′ UTR (SEQ ID NO: 1354), an mtRNR1-LSP1 3′ UTR (SEQ ID NO: 1355), an AES-mtRNR1 3′ UTR (SEQ ID NO: 1356), an AES-hBg 3′ UTR (SEQ ID NO: 1357), an FCGRT-hBg 3′ UTR (SEQ ID NO: 1358), a 2hBg 3′ UTR (SEQ ID NO: 1359), and a HBA1 3′ UTR (SEQ ID NO: 1360), wherein the T nucleotides are U nucleotides in the linearized ribozyme-RNA construct.

38. The linearized ribozyme-RNA construct of any one of claims 35-37, wherein the 3′ UTR sequence further comprises a WPRE sequence.

39. The linearized ribozyme-RNA construct of claim 38, wherein the WPRE sequence comprises the nucleic acid sequence of SEQ ID NO: 1353, wherein the T nucleotides are U nucleotides in the linearized ribozyme-RNA construct.

40. The linearized ribozyme-RNA construct of claim 38 or 39, wherein the poly(A) sequence positioned 3′ of the WPRE sequence.

41. The linearized ribozyme-RNA construct of any one of claims 35-40, wherein the poly(A) sequence has a length ranging from about 5 to about 1000 adenine nucleotides.

42. The linearized ribozyme-RNA construct of any one of claims 35-41, wherein the poly(A) sequence has a length ranging from about 5 to about 300 adenine nucleotides.

43. The linearized ribozyme-RNA construct of any one of claims 35-42, wherein the first and/or second ribozyme is selected from the group consisting a twister ribozyme, twister sister (TS) ribozyme, a hammerhead ribozyme, a hairpin ribozyme, a hepatitis delta virus (HDV) ribozyme, a Varkud satellite (VS) ribozyme, a glucosamine-6-phosphate (GlmS) ribozyme, a pistol ribozyme, and a hatchet ribozyme.

44. The linearized ribozyme-RNA construct of any one of claims 35-43, wherein the first ribozyme and the second ribozyme are the same twister ribozyme.

45. The linearized ribozyme-RNA construct of any one of claims 35-44, wherein the first twister ribozyme and/or the second twister ribozyme is a P1 twister ribozyme.

46. The linearized ribozyme-RNA construct of any one of claims 35-45, wherein the first ribozyme and/or the second ribozyme is a P3 twister ribozyme.

47. The linearized ribozyme-RNA construct of any one of claims 35-46, wherein the first twister ribozyme and/or the second twister ribozyme comprises a nucleic acid sequence having at least 90% sequence identity of
(SEQ ID NO: 1412)
5′-GCCAUCAGUCGCCGGUCCCAAGCCCGGAUAAAAUGGGAGGGGGGGGA
AACCGCCU-3′.

48. The linearized ribozyme-RNA construct of any one of claims 35-47, wherein the first twister ribozyme and/or the second twister ribozyme comprises a nucleic acid sequence having at least 90% sequence identity of
(SEQ ID NO: 1414)
5′-AACACUGCCAAUGCCGGUCCCAAGCCCGGAUAAAAGTGGAGGGUACA
GUCCACGC-3′.

49. The linearized ribozyme-RNA construct of any one of claims 35-48, wherein a portion of the first ligation sequence is complementary to a portion of the first twister ribozyme and a portion of the second ligation sequence is complementary to a portion of the second twister ribozyme

50. The linearized ribozyme-RNA construct of claim 49, wherein the portion of the first ligation sequence that is complementary to the portion of the first twister ribozyme is also complementary to the portion of the second ligation sequence that is complementary to the portion of the second twister ribozyme.

51. The linearized ribozyme-RNA construct of any one of claims 35-50, wherein the first and/or the second ligation sequence comprises a nucleic acid sequence having at least 90% sequence identity of 5′-AACCAUGCCGACUGAUGGCAG-3′ (SEQ ID NO: 1413).

52. The linearized ribozyme-RNA construct of any one of claims 35-51, wherein the first and/or the second ligation sequence comprises a nucleic acid sequence having at least 90% sequence identity of 5′-CUGCCAUCAGUCGGCGUGGACUGUAG-3′ (SEQ ID NO: 1415).

53. The linearized ribozyme-RNA construct of any one of claims 35-52, wherein the construct comprises one or more modified nucleic acids.

54. A DNA construct comprising a RNA polymerase II promoter and a nucleic acid sequence encoding a ribozyme-RNA construct, wherein the ribozyme-RNA construct comprises from 5′ to 3′ end:
(a) a first twister ribozyme;
(b) a first ligation sequence;
(c) an IRES sequence;
(d) a polynucleotide sequence of interest encoding a recombinant polypeptide;
(e) a 3′ UTR sequence;
(f) a poly(A) sequence;
(g) a second ligation sequence; and
(h) a second twister ribozyme,
wherein promoter is operably linked to the nucleic acid sequence encoding the ribozyme-RNA construct.

55. The DNA construct of claim 54, wherein the IRES sequence is selected from the group consisting of a cricket paralysis virus IRES (SEQ ID NO: 1330), a Homo sapiens IGF2 IRES (SEQ ID NO: 1331), a hepatovirus A IRES (SEQ ID NO: 1332), a hepatitis C virus H77 isolate IRES (SEQ ID NO: 1333), a Homo sapiens FGF1 IRES (SEQ ID NO: 1334), a bovine viral diarrhea virus 1 IRES (SEQ ID NO: 1335), a human rhinovirus A89 IRES (SEQ ID NO: 1336), a pan paniscus LIMA1 (SEQ ID NO: 1337), a human adenovirus 2 IRES (SEQ ID NO: 1338), a Montana myotis leukoencephalitis virus IRES (SEQ ID NO: 1339), a Homo sapiens RANBP3 IRES (SEQ ID NO: 1340), a pestivirus giraffe 1 IRES (SEQ ID NO: 1341), a Homo sapiens TGIF1 IRES (SEQ ID NO: 1342), a human poliovirus 1 mahoney IRES (SEQ ID NO: 1343), a foot-and-mouth disease virus type O IRES (SEQ ID NO: 1344), an encephalomyocarditis virus 7A IRES (SEQ ID NO: 1345), an encephalomyocarditis virus 6A IRES (SEQ ID NO: 1346), an enterovirus 71 IRES (SEQ ID NO: 1347), and a coxsackievirus B3 IRES (SEQ ID NO: 1348).

56. The DNA construct of claim 54 or 55, wherein the 3′ UTR sequence is selected from the group consisting of mtRNR1-AES 3′ UTR (SEQ ID NO: 1354), mtRNR1-LSP1 3′ UTR (SEQ ID NO: 1355), AES-mtRNR1 3′ UTR (SEQ ID NO: 1356), AES-hBg 3′ UTR (SEQ ID NO: 1357), FCGRT-hBg 3′ UTR (SEQ ID NO: 1358), 2hBg 3′ UTR (SEQ ID NO: 1359), and HBA1 3′ UTR (SEQ ID NO: 1360).

57. The DNA construct of any one of claims 54-56, wherein the 3′ UTR sequence further comprises a WPRE sequence.

58. The DNA construct of claim 57, wherein the WPRE sequence comprises the nucleic acid sequence of SEQ ID NO: 1353.

59. The DNA construct of any one of claims 54-56, wherein the poly(A) sequence is positioned 3′ of the WPRE sequence.

60. The DNA construct of any one of claims 54-59, wherein the poly(A) sequence has a length ranging from about 5 to about 1000 adenine nucleotides.

61. The DNA construct of any one of claims 54-60, wherein the poly(A) sequence has a length ranging from about 5 to about 300 adenine nucleotides.

62. The DNA construct of any one of claims 54-61, wherein the first and/or second ribozyme is selected from the group consisting a twister ribozyme, twister sister (TS) ribozyme, a hammerhead ribozyme, a hairpin ribozyme, a hepatitis delta virus (HDV) ribozyme, a Varkud satellite (VS) ribozyme, a glucosamine-6-phosphate (GlmS) ribozyme, a pistol ribozyme, and a hatchet ribozyme.

63. The DNA construct of any one of claims 54-62, wherein the first ribozyme and the second ribozyme are the same twister ribozyme.

64. The DNA construct of any one of claims 54-63, wherein the first Twister ribozyme and/or the second twister ribozyme is a P1 twister ribozyme.

65. The DNA construct of any one of claims 54-64, wherein the first ribozyme and/or the second ribozyme is a P3 twister ribozyme.

66. The DNA construct of any one of claims 54-65, wherein the first twister ribozyme and/or the second twister ribozyme comprises a nucleic acid sequence having at least 90% sequence identity of
(SEQ ID NO: 1349)
5′-GCCATCAGTCGCCGGTCCCAAGCCCGGATAAAATGGGAGGGGGGGGA
AACCGCCT-3′.

67. The DNA construct of any one of claims 54-66, wherein the first twister ribozyme and/or the second twister ribozyme comprises a nucleic acid sequence having at least 90% sequence identity of 5′-AACACTGCCAATGCCGGTCCCAAGCCCGGATAAAAGTGGAGGGTACAGTCCACGC-3′ (SEQ ID NO: 1350).

68. The DNA construct of any one of claims 54-67, wherein a portion of the first ligation sequence is complementary to a portion of the first twister ribozyme and a portion of the second ligation sequence is complementary to a portion of the second twister ribozyme

69. The DNA construct of claim 68, wherein the portion of the first ligation sequence that is complementary to the portion of the first twister ribozyme is complementary to the portion of the second ligation sequence that is complementary to the portion of the second twister ribozyme.

70. The DNA construct of any one of claims 54-69, wherein the first and/or the second ligation sequence comprises a nucleic acid sequence having at least 90% sequence identity of 5′-AACCATGCCGACTGATGGCAG-3′ (SEQ ID NO:1351).

71. The DNA construct of any one of claims 54-70, wherein the first and/or the second ligation sequence comprises a nucleic acid sequence having at least 90% sequence identity of 5′-CTGCCATCAGTCGGCGTGGACTGTAG-3′ (SEQ ID NO: 1352).

72. A cell comprising the DNA construct of any one of claims 54-71.

73. The cell of claim 72, wherein the cell is a eukaryotic cell.

74. The cell of claim 73, wherein the eukaryotic cell is a mammalian cell.

75. The cell of claim 73 or 74, wherein the eukaryotic cell is a human cell.

76. A cell comprising a circular RNA construct, wherein the circular RNA construct comprises:
(a) a first ligation sequence;
(b) an IRES sequence positioned 3′ of the first ligation sequence;
(c) a polynucleotide sequence of interest encoding a recombinant polypeptide and positioned 3′ of the IRES sequence;
(d) a 3′ UTR sequence positioned 3′ of the IRES sequence;
(e) a poly(A) sequence positioned 3′ of the 3′ UTR; and
(f) a second ligation sequence positioned 3′ of the poly (A) sequence,
wherein the first and second ligation sequences are ligated together.

77. The cell of claim 76, wherein the cell is a mammalian cell.

78. The cell of claim 76 or 77, wherein the cell is a human cell.

79. The cell of any one of claims 76-78, wherein the cell produces an elevated level of the recombinant polypeptide as compared to a corresponding wild-type cell.

80. The cell of any one of claims 76-79, wherein the first and second ligation sequences are ligated together in the cell by an endogenous RNA ligase.

81. The cell of any one of claims 76-80, wherein the IRES sequence is selected from the group consisting of a cricket paralysis virus IRES (SEQ ID NO: 1330), a Homo sapiens IGF2 IRES (SEQ ID NO: 1331), a hepatovirus A IRES (SEQ ID NO: 1332), a hepatitis C virus H77 isolate IRES (SEQ ID NO: 1333), a Homo sapiens FGF1 IRES (SEQ ID NO: 1334), a bovine viral diarrhea virus 1 IRES (SEQ ID NO: 1335), a human rhinovirus A89 IRES (SEQ ID NO: 1336), a pan paniscus LIMA1 (SEQ ID NO: 1337), a human adenovirus 2 IRES (SEQ ID NO: 1338), a Montana myotis leukoencephalitis virus IRES (SEQ ID NO: 1339), a Homo sapiens RANBP3 IRES (SEQ ID NO: 1340), a pestivirus giraffe 1 IRES (SEQ ID NO: 1341), a Homo sapiens TGIF1 IRES (SEQ ID NO: 1342), a human poliovirus 1 mahoney IRES (SEQ ID NO: 1343), a foot-and-mouth disease virus type O IRES (SEQ ID NO: 1344), an encephalomyocarditis virus 7A IRES (SEQ ID NO: 1345), an encephalomyocarditis virus 6A IRES (SEQ ID NO: 1346), an enterovirus 71 IRES (SEQ ID NO: 1347), and a coxsackievirus B3 IRES (SEQ ID NO: 1348), wherein the T nucleotides are U nucleotides in the RNA construct.

82. The cell of any one of claims 76-81, wherein the 3′ UTR sequence is selected from the group consisting of mtRNR1-AES 3′ UTR (SEQ ID NO: 1354), mtRNR1-LSP1 3′ UTR (SEQ ID NO: 1355), AES-mtRNR1 3′ UTR (SEQ ID NO: 1356), AES-hBg 3′ UTR (SEQ ID NO: 1357), FCGRT-hBg 3′ UTR (SEQ ID NO: 1358), 2hBg 3′ UTR (SEQ ID NO: 1359), and HBA1 3′ UTR (SEQ ID NO: 1360), wherein the T nucleotides are U nucleotides in the RNA construct.

83. The cell of any one of claims 76-82, wherein the 3′ UTR sequence comprises a WPRE sequence.

84. The cell of any claim 83, wherein the WPRE sequence comprises the nucleic acid sequence of SEQ ID NO: 1353, wherein the T nucleotides are U nucleotides in the RNA construct.

85. The cell of claim 83 or 84, wherein the poly(A) sequence is positioned 3′ of the WPRE sequence.

86. The cell of any one of claims 76-85, wherein the poly(A) sequence has a length ranging from about 5 to about 1000 adenine nucleotides.

87. The cell of any one of claims 76-86, wherein the poly(A) sequence has a length ranging from about 5 to about 300 adenine nucleotides.

88. The cell of any one of claims 76-87, wherein a portion of the first ligation sequence is complementary to a portion of the second ligation sequence.

89. The cell of any one of claims 76-88, wherein the first and/or the second ligation sequence comprises a nucleic acid sequence having at least 90% sequence identity of 5′-AACCAUGCCGACUGAUGGCAG-3′ (SEQ ID NO: 1413).

| (SEQ ID NO: 1413) | |
|---|---|
| | 5′-AACCAUGCCGACUGAUGGCAG-3′. |

90. The cell of any one of claims 76-89, wherein the first and/or the second ligation sequence comprises a nucleic acid sequence having at least 90% sequence identity of

| (SEQ ID NO: 1415) | |
|---|---|
| | 5′-CUGCCAUCAGUCGGCGUGGACUGUAG-3′. |

91. The cell of any one of claims 76-90, wherein the circular RNA construct comprises one or more modified nucleic acids.

92. The cell of any one of claims 76-91, wherein the cell is an engineered cell.

93. The cell of any one of claims 76-92, wherein the cell lacks the DNA construct of any one of claims 52-68, lacks the linearized ribozyme-RNA construct of any one of claims 34-51, or lacks the DNA construct of any one of claims 52-68 and the linearized ribozyme-RNA construct.

94. A ribozyme RNA-construct(s) comprising from 5′ to 3′:
an optional primer region,
an optional barcode region,
a first ribozyme domain,
a first ligation stem domain,
a payload domain,
a second ligation stem domain, and
a second ribozyme domain;
wherein the payload domain comprises from 5′ to 3′:
an internal ribosome entry site (IRES) or a P2A peptide coding sequence,
a coding sequence of at least one polypeptide and/or nucleic acid of interest, and
a 3′UTR sequence;
wherein the transcription of the payload domain is activated by or dependent upon the activity of the one or more ribozymes.

95. The ribozyme RNA-construct(s) of claim 94, wherein the first and second ligation stem domains are from 30 to 60 bp in length.

96. The ribozyme RNA-construct(s) of claim 95, wherein the first and second ligation stem domains are from 40 to 50 bp in length.

97. The ribozyme RNA-construct(s) of claim 94, wherein the first and second ribozymes are selected from the group consisting of a twister ribozyme, a hammerhead ribozyme, a hatchet ribozyme, a hepatitis delta virus ribozyme, a ligase ribozyme, a pistol ribozyme, a twister sister ribozyme, a Vg1 ribozyme, a VS ribozyme and derivatives of any of the foregoing.

98. The ribozyme RNA-construct(s) of claim 97, wherein the first and second ribozymes are twister ribozymes.

99. The ribozyme RNA-construct(s) of claim 98, wherein the first ribozyme is a P3 twister ribozyme.

100. The ribozyme RNA-construct(s) of claim 98, wherein the second ribozyme is a P1 twister ribozyme.

101. The ribozyme RNA-construct(s) of claim 94, wherein the first ligation stem domain comprises a 5′-OH end, the second ligation stem domain comprises a 2′, 3′-cyclic phosphate end, and
wherein the first and second ligation stem domains form a stem substrate for an RNA ligase.

102. The ribozyme RNA-construct(s) of claim 101, wherein the RNA ligase is RtcB.

103. The ribozyme RNA-construct(s) of any one of claims 94-102, wherein the payload or the at least one polypeptide of interest comprises a zinc finger or CRISPR-Cas9 coding sequence.

104. The ribozyme RNA-construct(s) of any one of claim 94-102, wherein the payload domain or the at least one polypeptide of interest comprise a sequence that encodes a polypeptide/protein selected from insulin, clotting factor IX, the cystic fibrosis transmembrane conductance regulator protein, and the dystrophin protein.

105. The ribozyme RNA-construct(s) of any one of claims 94-102, wherein the ribozyme RNA-construct(s) is linearized.

106. The ribozyme RNA-construct(s) of any one of claims 94-105, wherein the 3′ UTR comprises a Woodchuck Hepatitis Virus Postranslational Regulatory Element (WPRE).

107. The ribozyme activated RNA construct(s) of claim 106, wherein the WPRE is followed by a poly(A) stretch.

108. The ribozyme activated RNA construct(s) of any one of claims 94-105, wherein the 3′ UTR sequence is selected from the group consisting of an mtRNR1-AES 3′ UTR (SEQ ID NO: 1354), an mtRNR1-LSP1 3′ UTR (SEQ ID NO: 1355), an AES-mtRNR1 3′ UTR (SEQ ID NO: 1356), an AES-hBg 3′ UTR (SEQ ID NO: 1357), an FCGRT-hBg 3′ UTR (SEQ ID NO: 1358), a 2hBg 3′ UTR (SEQ ID NO: 1359), and a HBA1 3′ UTR (SEQ ID NO: 1360), wherein the T nucleotides are U nucleotides in the RNA construct.

109. The ribozyme activated RNA construct(s) of any one of claims 94-108, wherein the first and/or the second ligation stem domain comprises a nucleic acid sequence having at least 90% sequence identity of 5′ AACCAUGCCGACUGAUGGCAG 3′ (SEQ ID NO: 1413).

110. The ribozyme activated RNA construct(s) of any one of claims 94-108, wherein the first and/or the second ligation stem domain comprises a nucleic acid sequence having at least 90% sequence identity of 5′ CUGCCAUCAGUCGGCGUGGACUGUAG 3′ (SEQ ID NO: 1415).

111. The ribozyme activated RNA construct(s) of claim 106, wherein the WPRE sequence comprises the nucleic acid sequence of SEQ ID NO: 1353.

112. The ribozyme activated RNA construct(s) of any one of claims 94-111, wherein the IRES sequence is selected from the group consisting of a cricket paralysis virus IRES (SEQ ID NO: 1330), a Homo sapiens IGF2 IRES (SEQ ID NO: 1331), a hepatovirus A IRES (SEQ ID NO: 1332), a hepatitis C virus H77 isolate IRES (SEQ ID NO: 1333), a Homo sapiens FGF1 IRES (SEQ ID NO: 1334), a bovine viral diarrhea virus 1 IRES (SEQ ID NO: 1335), a human rhinovirus A89 IRES (SEQ ID NO: 1336), a pan paniscus LIMA1 (SEQ ID NO: 1337), a human adenovirus 2 IRES (SEQ ID NO: 1338), a Montana myotis leukoencephalitis virus IRES (SEQ ID NO: 1339), a Homo sapiens RANBP3 IRES (SEQ ID NO: 1340), a pestivirus giraffe 1 IRES (SEQ ID NO: 1341), a Homo sapiens TGIF1 IRES (SEQ ID NO: 1342), a human poliovirus 1 mahoney IRES (SEQ ID NO: 1343), a foot-and-mouth disease virus type O IRES (SEQ ID NO: 1344), an encephalomyocarditis virus 7A IRES (SEQ ID NO: 1345), an encephalomyocarditis virus 6A IRES (SEQ ID NO: 1346), an enterovirus 71 IRES (SEQ ID NO: 1347), and a coxsackievirus B3 IRES (SEQ ID NO: 1348), wherein the T nucleotides are U nucleotides in the RNA construct.

113. The ribozyme RNA-construct(s) of any one of claims 94-112, wherein a vector or plasmid comprises the ribozyme RNA-construct(s) located downstream of an RNA promoter.

114. The ribozyme RNA-construct(s) of claim 113, wherein the RNA promoter is a polymerase III promoter.

115. The ribozyme RNA-construct(s) of claim 114, wherein the polymerase III promoter is a hU6 promoter.

116. The ribozyme RNA-construct(s) of claim 94, wherein the first and second ligation stem domains are substrates of naturally occurring ligases in situ.

117. The ribozyme RNA-construct(s) of claim 116, wherein the naturally occurring ligase is RtcB.

118. The ribozyme RNA-construct(s) of claim 94, wherein the at least one polypeptide of interest comprises two or more polypeptides of interest separated by a self-cleaving peptide.

119. The ribozyme RNA-construct(s) of claim 118, wherein the self-cleaving peptide comprises a 2A- or 2A-like-peptide.

120. The ribozyme RNA-construct(s) of claim 94, wherein the at least one polypeptide of interest is selected from the group consisting of a prodrug activating enzyme, a biological response modifier, a receptor ligand, an immunoglobulin derived binding polypeptide, a non-immunoglobulin binding polypeptide, an antigenic polypeptide, a genome editing enzyme, and any combination thereof wherein multiple polypeptides are separated by a 2A or 2A-like peptide.

121. The ribozyme RNA-construct(s) of claim 120, wherein the biological response modifier or an immunopotentiating cytokine.

122. The ribozyme RNA-construct(s) of claim 121, wherein the immunopotentiating cytokine is selected from the group consisting of interleukins 1 through 38, interferon, tumor necrosis factor (TNF), and granulocyte-macrophage-colony stimulating factor (GM-CSF).

123. The ribozyme RNA-construct(s) of claim 120, wherein the 2A- or 2A-like peptide further comprises a GSG linker moiety.

124. The ribozyme RNA-construct(s) of claim 120, wherein the genome editing enzyme is selected from the group consisting of a zinc finger nuclease, a transcription activator-like effector nuclease (TALEN), an engineered meganuclease and an RNA-guided DNA endonuclease (Cas) polypeptide.

125. The ribozyme RNA-construct(s) of any one of claims 35-53 and 94-124, wherein the 5′ and 3′ ribozyme sequences are independently selected from a sequence that is at least 85-100% identical to 5′-GCCATCAGTCGCCGGTCCCAAGCCCGGATAAAATGGGAGGGGGCGGGAAACCGC CT-3′ (SEQ ID NO:1349) or 5′-AACACTGCCAATGCCGGTCCCAAGCCCGGATAAAAGTGGAGGGTACAGTCCACG C-3′ (SEQ ID NO:1350), wherein T can be U.

126. The ribozyme RNA-construct(s) of any one of claims 35-53 and 94-124, wherein the first and second ligation stem domains are independently selected from a sequence that is at least 85-100% identical to 5′-AACCATGCCGACTGATGGCAG-3′ (SEQ ID NO:1351) or 5′-CTGCCATCAGTCGGCGTGGACTGTAG-3′ (SEQ ID NO:1352).

127. An RNA or DNA vector comprising the ribozyme RNA-construct(s) of any one of claims 35-53 and 94-126, the ribozyme RNA-construct(s) of any one of claims 35-53 and 94-126 or the DNA construct of any one of claims 54-71.

128. The vector of claim 127, wherein the vector is a viral vector.

129. The vector of claim 128, wherein the viral vector is a replicating or non-replicating retroviral vector.

130. The vector of claim 128, wherein the viral vector is an adenoviral vector, an adeno-associated viral vector (AAV), or a lentiviral vector.

131. The vector of claim 130, wherein the adenoviral vector is selected from the group consisting of AAV1 serotype, an AAV2 serotype, AAV3 serotype, an AAV4 serotype, AAV5 serotype, an AAV6 serotype, AAV7 serotype, an AAV8 serotype, an AAV9 serotype, a derivative of any of these.

132. A circular RNA construct obtain by in vitro transcription of a DNA construct of any one of claims 54-71 and a ribozyme activated RNA-construct of any one of claims 94-126.

133. The circular RNA construct of claim 132, wherein the construct comprises a duplex of the first and second ligation stem domains and (i) an internal ribosome entry site (IRES) or a P2A peptide coding sequence, (ii) a coding sequence of at least one polypeptide and/or nucleic acid of interest, and (iii) a 3′UTR sequence.

134. The circular RNA construct of claim 132, wherein the at least one polypeptide of interest is selected from the group consisting of a prodrug activating enzyme, a biological response modifier, a receptor ligand, an immunoglobulin derived binding polypeptide, a non-immunoglobulin binding polypeptide, an antigenic polypeptide, a genome editing enzyme, and any combination thereof wherein multiple polypeptides are separated by a 2A or 2A-like peptide.

135. The circular RNA construct of claim 129, wherein the circular RNA construct comprises a coding region for a gene editing polypeptide and a nucleic acid guide sequence.

136. A pharmaceutical composition comprising the RNA construct of any one of claims 1-15, 35-71, and 94-126, the vector of any one of claims 127-131 or the circular RNA construct of any one of claims 132-135, and a pharmaceutically acceptable carrier.

137. A host cell comprising the RNA construct of any one of claims 1-15, 35-71, and 94-126, the vector of any one of claims 127-131 or the circular RNA construct of any one of claims 132-135.

138. The host cell of claim 137, wherein the host cell is a eukaryotic cell.

139. The host cell of claim 137, wherein the ribozyme RNA construct, the vector or the circular RNA construct is episomal.

140. The host cell of claim 137, wherein the circular RNA constructs edits the genome or an expressed RNA in the host cell.

141. A vaccine composition comprising the ribozyme RNA-construct(s) of claim 90, wherein the ribozyme RNA-construct(s) is linearized and comprises:
a 5′ ribozyme;
a 5′ ligation sequence;
an internal ribosome entry site (IRES) sequence;
an RNA coding sequence for at least one antigenic polypeptide;
a 3′UTR sequence;
a 3′ ligation sequence; and
a 3′ ribozyme sequence, and a pharmaceutically acceptable carrier.

142. A vaccine composition comprising the RNA construct of claim 141, wherein the coding sequence encoding a polypeptide of interest encodes for an antigenic polypeptide.

The application's sequence listing, which the Patent Office published only in electronic form, follows.

SEQUENCE LISTING (1439 sequences)

SEQ ID NO: 1 - DNA, 174 bp, synthetic construct
  misc_feature 1..174: note = Description of Artificial Sequence: Synthetic polynucleotide
  source 1..174: mol_type = other DNA
aaaaacttccggcgggaaccggaaggtgcggtggcactcacggaatctcgggtcttctgacgtgccgggcgggaagatgtcatcattgccaagaagagcgaaagtacaggtccaggatgtggtactgaaagatgaattttcttcattctctgagttatcatctgcctctgaaga

SEQ ID NO: 2 - DNA, 174 bp, synthetic construct
  misc_feature 1..174: note = Description of Artificial Sequence: Synthetic polynucleotide
  source 1..174: mol_type = other DNA
aaaatccaccccaacaatcgctgtgtgccgctttagtgcgctcgccgtcggctctacctgcgtgctttagctccttctcgcctgatccttctgtctctcccaaccccggacacccggcttcgactggttatatcttcggtgttcttttcctctcttcttctttcgcggttcagc

SEQ ID NO: 3 - DNA, 174 bp, synthetic construct
  misc_feature 1..174: note = Description of Artificial Sequence: Synthetic polynucleotide
  source 1..174: mol_type = other DNA
aaacgtcaggtatcttttaaatcgcgatagttttcgctgtgtcaggctttcttcggtggagctccgagggtagctaggttctaggtttgaaacagatgcagaatccaaaggcagcgcaaaaaacagccaccgattttgctatgtctctgagctgcgagataatcagacagctaa

SEQ ID NO: 4 - DNA, 174 bp, synthetic construct
  misc_feature 1..174: note = Description of Artificial Sequence: Synthetic polynucleotide
  source 1..174: mol_type = other DNA
aaactggtcactgcagtttctaataatactattcaagtccacacatttcctgaaggagttccagatggtatattgactcgcttcactacaaatgcaaaccatgtggtctttaatggggatggtactaaaattgctgctggatctagtgattttctagtcaaaattgtggatgtg

SEQ ID NO: 5 - DNA, 174 bp, synthetic construct
  misc_feature 1..174: note = Description of Artificial Sequence: Synthetic polynucleotide
  source 1..174: mol_type = other DNA
aaagatcgctgtgcagtcagccttaaacactgactgcacccctcccagatttcttttacattaactaaaaagtcttatcacacaatctcataaaatttatgtaatttcatttaattttagccacaaatcatcaaaatgacgaggattttgacagctttcaaagtggtgaggaca

SEQ ID NO: 6 - DNA, 174 bp, synthetic construct
  misc_feature 1..174: note = Description of Artificial Sequence: Synthetic polynucleotide
  source 1..174: mol_type = other DNA
aaagcctattttcttttcgtttagatacattgccttttgcctaggctggcgtcgagacttgaggccgttgcagactttggcgcggctcgcgcctcctgcttcaagagcccagcggtgagagctggcctgcggcacgcggcctaatgccagacagtaacagtttggaggatcaag

SEQ ID NO: 7 - DNA, 174 bp, synthetic construct
  misc_feature 1..174: note = Description of Artificial Sequence: Synthetic polynucleotide
  source 1..174: mol_type = other DNA
aaaggaaccgggttgtcttgggccgggcagggcgggtggtgactctcaaaaggaaataggatcatggcagcagatgatgacaatggtgatggaacaagtttatttgatgtcttttctgcttctcctcttaagaacaatgatgaaggctcactggacatatacgctgggttggac

SEQ ID NO: 8 - DNA, 174 bp, synthetic construct
  misc_feature 1..174: note = Description of Artificial Sequence: Synthetic polynucleotide
  source 1..174: mol_type = other DNA
aaagtcgtcccaccatcaatgaaggcaggccacttccggcgtagccatggcggctaacgctactaccaacccgtcgcagctgctgcccttagagcttgtggacaaatgtataggatcaagaattcacatcgtgatgaagagtgataaggaaattgttggtactcttctaggatt

SEQ ID NO: 9 - DNA, 174 bp, synthetic construct
  misc_feature 1..174: note = Description of Artificial Sequence: Synthetic polynucleotide
  source 1..174: mol_type = other DNA
aaagtgctgggattacaggagtgtgccactgcgcctgaccagctttataaagtttatagggacagtgtcaccactttacagaagagggactgaggctctgaggaggaagttccttgccagggtccgagtgtcgccaccctgagaactccagcacccacctccctactctccctc

SEQ ID NO: 10 - DNA, 174 bp, synthetic construct
  misc_feature 1..174: note = Description of Artificial Sequence: Synthetic polynucleotide
  source 1..174: mol_type = other DNA
aaagtggctgaatgagaaatgtagattgcagagggcaactggtgtgtttatatgcctgacattatttgggttttcccccctcaggcagaagctgaggaagattgtcattctgatactgtcagagcagatgatgatgaagaaaatgaaagtcctgctgaaacagatctgcaggca

SEQ ID NO: 11 - DNA, 174 bp, synthetic construct
  misc_feature 1..174: note = Description of Artificial Sequence: Synthetic polynucleotide
  source 1..174: mol_type = other DNA
aaatagtctactttccggtagcggtgccagggcagtggcctaatacggaactccatttcccggcgtgcctcgcggaggccgctgaactcagaagcgggaggccggttccggttgcatcagcgagggattcacggcgaaatgagactgttcgtgagtgatggcgtcccgggttgc

SEQ ID NO: 12 - DNA, 174 bp, synthetic construct
  misc_feature 1..174: note = Description of Artificial Sequence: Synthetic polynucleotide
  source 1..174: mol_type = other DNA
aaatcacactggctacagcgttgtgtgtttcttggtaaacactgggtaaatcagctcctgtggatgttgactgaagtttctatgtttgcaagctaatcctcagcagtttctttatgtattgctgtccttgaatattagcccatttgaaaacgcctgggaagttcagccatcagt

SEQ ID NO: 13 - DNA, 174 bp, synthetic construct
  misc_feature 1..174: note = Description of Artificial Sequence: Synthetic polynucleotide
  source 1..174: mol_type = other DNA
aaatggagacttaggtcccctgcaaagcagaggggaggctggggtcacagctggccactgagagacccatccccctcagcaccgtggcttcccagctctccctgtcctcctccccccgacatctgccccttccctcctaaccccaggaccaggggacccagatctggagctttg

SEQ ID NO: 14 - DNA, 174 bp, synthetic construct
  misc_feature 1..174: note = Description of Artificial Sequence: Synthetic polynucleotide
  source 1..174: mol_type = other DNA
aacacgcaggcgcgtctcctcaaatcctgtccctacacccctcctctttctcttcatttcgttccccctcctcttgcagcacctcggcaggttcaaactcttctccgggagcgtggcggcgatcgcgaggtcacgtgatgagcatcctgctgcccaacatggcggagttcgaca

SEQ ID NO: 15 - DNA, 174 bp, synthetic construct
  misc_feature 1..174: note = Description of Artificial Sequence: Synthetic polynucleotide
  source 1..174: mol_type = other DNA
aacgctcagcgaaattgactgccccactgtcatctgcctctcaatttggtactctgtaactctgtgaccaccaagaagcctttttccgtcccccacaaagctctttttggaaaattccctacgggagctgaattttaagcccatttactttataggaagaaacagaaaggcagc

SEQ ID NO: 16 - DNA, 174 bp, synthetic construct
  misc_feature 1..174: note = Description of Artificial Sequence: Synthetic polynucleotide
  source 1..174: mol_type = other DNA
aacgtggtggggcagggcctccgagcgtggttggactttgaaggggatcggccgccatgctgcatcccctttttggaattgctcaaccaggtggtaaccggcgccgcttcctggccttgggaggtggttcctttcttaacccacaagaacctctcccaagagaacttggtcctg

SEQ ID NO: 17 - DNA, 174 bp, synthetic construct
  misc_feature 1..174: note = Description of Artificial Sequence: Synthetic polynucleotide
  source 1..174: mol_type = other DNA
aactcgcgggagcgtcaccgtcctgcgacgcttcagaggatccttaggcctcagtggtctttgacccccggccccaggacctgaccccaaggaaacctccgggacctgtggctggagagggactttgaacatgtcggggatcgccctcagcagactcgcccaggagaggaaagc

SEQ ID NO: 18 - DNA, 174 bp, synthetic construct
  misc_feature 1..174: note = Description of Artificial Sequence: Synthetic polynucleotide
  source 1..174: mol_type = other DNA
aactcggtgagtgacctgcgatgtccgcgaccctcaaccttggcccagcccgcgagccgcgcctgggcctggacttaggatggaacccttccggagaaggctgtacgcagggcctcaaagacgtcccacccgagccgacccgagacatcctcgctttaaagagccttccccggg

SEQ ID NO: 19 - DNA, 174 bp, synthetic construct
  misc_feature 1..174: note = Description of Artificial Sequence: Synthetic polynucleotide
  source 1..174: mol_type = other DNA
aactgggcggtaaaatagcccttctgttactgtccggggctgcggggtgagaggccagggccgagaagggcttcaggacgcgggaggcgcacttgcttcaagtcgcgggcgtgggaacggggttgcaaaacggggcctctttgtccgggcttgcttccggcgtcatggctcaaa

SEQ ID NO: 20 - DNA, 174 bp, synthetic construct
  misc_feature 1..174: note = Description of Artificial Sequence: Synthetic polynucleotide
  source 1..174: mol_type = other DNA
aagaaaatcctgcttgacaaaaaccgtcacttaggaaaagatgtcctttcgggcagccaggctcagcatgaggaacagaaggaatgacactctggacagcacccggaccctgtactccagcgcgtctcggagcacagacttgtcttacagtgaaagcgacttggtgaattttat

SEQ ID NO: 21 - DNA, 174 bp, synthetic construct
  misc_feature 1..174: note = Description of Artificial Sequence: Synthetic polynucleotide
  source 1..174: mol_type = other DNA
aagaagaaaaatgtgttgtgagcagggggagcctcagctgcctcaggccgttcaggacagaagggtgtttctgaaggccggagcaagttttgaagaagtccctatcagattacacttggttgactactccggagcagccactaagagggatgaacaggcctgcgtggaaattga

SEQ ID NO: 22 - DNA, 174 bp, synthetic construct
  misc_feature 1..174: note = Description of Artificial Sequence: Synthetic polynucleotide
  source 1..174: mol_type = other DNA
aagaaggaaactagctgggaccgtgcagattcatcacaagagagctacaagagcctggaagaagctgaagactgctaccctccatccttactcaccctggacctgagagacctcttcaatcaggtggagcaaggccctctcctgtcctgccccaaggctggcacagacttgagc

SEQ ID NO: 23 - DNA, 174 bp, synthetic construct
  misc_feature 1..174: note = Description of Artificial Sequence: Synthetic polynucleotide
  source 1..174: mol_type = other DNA
aagatactcctcacctgctccttgaatgacagcgccacagaggtcacagggcaccgctggctgaaggggggcgtggtgctgaaggaggacgcgctgcccggccagaaaacggagttcaaggtggactccgacgaccagtggggagagtactcctgcgtcttcctccccgagccc

SEQ ID NO: 24 - DNA, 174 bp, synthetic construct
  misc_feature 1..174: note = Description of Artificial Sequence: Synthetic polynucleotide
  source 1..174: mol_type = other DNA
aaggaagctgtaaatgtatttgagttaagcttttgcgagaaaccctacagcttggggcctgggctcctctgaccatcctcattgagaaaggaaagtgagtccagagaagttgatgcttcctacctgttggagcggcccagcagtgtaagcgtggttgttactgccccatccgcc

SEQ ID NO: 25 - DNA, 174 bp, synthetic construct
  misc_feature 1..174: note = Description of Artificial Sequence: Synthetic polynucleotide
  source 1..174: mol_type = other DNA
aagttgaaaaagctgcatgcagttggaagggatcttcagatggtgctggtgactttctgttccttttggagttgacatgcatgtggattggaggaaaaataatcaacatatattctcctttcgtactgtttaaatcacaggaagaagcggctttaagacaaagatcaaaccaaa

SEQ ID NO: 26 - DNA, 174 bp, synthetic construct
  misc_feature 1..174: note = Description of Artificial Sequence: Synthetic polynucleotide
  source 1..174: mol_type = other DNA
aatattagagtctcaacccccaataaatataggactggagatgtctgaggctcattctgccctcgagcccaccgggaacgaaagagaagctctatctcccctccaggagcccagctatgaactccttctccacaagcgccttcggtccagttgccttctccctggggctgctcc

SEQ ID NO: 27 - DNA, 174 bp, synthetic construct
  misc_feature 1..174: note = Description of Artificial Sequence: Synthetic polynucleotide
  source 1..174: mol_type = other DNA
aatgctaaaggaaaaattttcttagcaatttcacaggaaaacctaagttttaagagaggttatcattctgactgggaactgaactattatgactaggtctataatttaataacaagtcacaatatctctctttcttgacatcaatttaaggtgacttttcacatagtagagaga

SEQ ID NO: 28 - DNA, 174 bp, synthetic construct
  misc_feature 1..174: note = Description of Artificial Sequence: Synthetic polynucleotide
  source 1..174: mol_type = other DNA
aatggactctagcctcctctgatagcctcatgccaggccccgtgcacattgctttgcttgcctccctcaatcctcatagcttctctttgggaagcctttgggtctgaagtgtctgtgagacctcacagaagagcacccctgggctccacttacctgccccctgctccttcaggg

SEQ ID NO: 29 - DNA, 174 bp, synthetic construct
  misc_feature 1..174: note = Description of Artificial Sequence: Synthetic polynucleotide
  source 1..174: mol_type = other DNA
aattggaggagttgttgttaggccgtcccggagacccggtcgggagggaggaaggtggcaagatggtgttggaaagcactatggtgtgtgtggacaacagtgagtatatgcggaatggagacttcttacccaccaggctgcaggcccagcaggatgctgtcaacatagtttgtc

SEQ ID NO: 30 - DNA, 174 bp, synthetic construct
  misc_feature 1..174: note = Description of Artificial Sequence: Synthetic polynucleotide
  source 1..174: mol_type = other DNA
acaagcacatgaacatgaagccggccactgcctctgctctgctcctgctcctgctgggcctggcctggacccaggggagccacggctggggtgcggacgcgtcatcactgcagaaacgtgcaggcagagccgatcagaactacaattacaaccagcatgcgtatcccactgcct

SEQ ID NO: 31 - DNA, 174 bp, synthetic construct
  misc_feature 1..174: note = Description of Artificial Sequence: Synthetic polynucleotide
  source 1..174: mol_type = other DNA
acaatcctttgcggtggttcaagatggcggcgcccagtggcactgtgagcgattcggaaagtagtaacagcagtagcgatgcggaggagctggagcggtgccgcgaggcggcaatgccggcttggggcttggagcaacgcccgcacgtggcagggaagccaagagccggtgctg

SEQ ID NO: 32 - DNA, 174 bp, synthetic construct
  misc_feature 1..174: note = Description of Artificial Sequence: Synthetic polynucleotide
  source 1..174: mol_type = other DNA
acactacttatcattgatgcatatataaaaccattttattttcgctattatttcagaggaagcgcctctgatttgtttcttttttccctttttgctctttctggctgtgtggtttggagaaagcacagttggagtagccggttgctaaataagtcccgagcgcgagcggagacg

SEQ ID NO: 33 - DNA, 174 bp, synthetic construct
  misc_feature 1..174: note = Description of Artificial Sequence: Synthetic polynucleotide
  source 1..174: mol_type = other DNA
acactaggtttttacagcaattctctgatgaccttgatatggtagaacgctgtgtatttcaagagtaagctctcgtttgaggagactaacaattcctgttttcgccagatttcttcttgaatggcaacctaaatgccagtccaaagaggcccccaatagacttgttcacccttc

SEQ ID NO: 34 - DNA, 174 bp, synthetic construct
  misc_feature 1..174: note = Description of Artificial Sequence: Synthetic polynucleotide
  source 1..174: mol_type = other DNA
acagatccgccatgacaaaggaggagagtcggggacttgagccgtggctccgacttgggcggagcctggaggggggtggttgcgatacggggaccggagaatttgcactttaaagtccgggtctgcccgttttcgtttcacagtaaccgacgtctcaagtcagaacatccagtc

SEQ ID NO: 35 - DNA, 174 bp, synthetic construct
  misc_feature 1..174: note = Description of Artificial Sequence: Synthetic polynucleotide
  source 1..174: mol_type = other DNA
acagtgctttcaaaagaattggcgtccgctgttcgcctctcctcccgggagtcttctgcctactcccagaagaggagggaagcacaggtgggtttctttagctctgcgtcggatccctgagaacttcgaagccatcctggctgaggctaatctccgctgtgcttcctctgcagt

SEQ ID NO: 36 - DNA, 174 bp, synthetic construct
  misc_feature 1..174: note = Description of Artificial Sequence: Synthetic polynucleotide
  source 1..174: mol_type = other DNA
acagttagaaaattaggaaaacagtggtttaacttgaattctctcttgacgggtccagaattaatatcagatacatatcttgcacttttcttggctcaattacaacaggaaggttattctatatttgtcgttaagggtgatctgccagattgcgaagctgaccaactcctgcag

SEQ ID NO: 37 - DNA, 174 bp, synthetic construct
  misc_feature 1..174: note = Description of Artificial Sequence: Synthetic polynucleotide
  source 1..174: mol_type = other DNA
acatctctcagccctctcagctgcaccggaccaccaacagttgtgattcaatgggcatgaattgctgtgtgatgctggggaggtgtttgtgattcttgacaaagtcatttgaatccatcacttcaagagagtgaaaggagccccgtctgatctgttggtgttgtaggaagaaac

SEQ ID NO: 38 - DNA, 174 bp, synthetic construct
  misc_feature 1..174: note = Description of Artificial Sequence: Synthetic polynucleotide
  source 1..174: mol_type = other DNA
accagctgatattttctttcctcaggaccagctgttcaggagcatcccggacgagagccaggcacatttgagacttggatccaactaaagaccgccgcagattcttctgcagcaatgtcggtgttagaagaaaatcggccgtttgctcaacaattatccaatgtctactttaca

SEQ ID NO: 39 - DNA, 174 bp, synthetic construct
  misc_feature 1..174: note = Description of Artificial Sequence: Synthetic polynucleotide
  source 1..174: mol_type = other DNA
accatagtctgtgtccgcgttcttttttccgggactgcagagttcggggaagctgtacgccgcctttcgctacgcggaatttgcagatcttcccctggacctcaggcctctccggctggagtagggtggacgcttcacataagcttctctggtcgaacttacccgaatctccag

SEQ ID NO: 40 - DNA, 174 bp, synthetic construct
  misc_feature 1..174: note = Description of Artificial Sequence: Synthetic polynucleotide
  source 1..174: mol_type = other DNA
acccaggatgcggaggcccttgtggggctgtggccactagggagtttcttggtcacaggacgtgaccccagccaggccctggtgttgaggtcaggacctttaccaggagaagtcaatacctaccagatccagaagattcccagaggtgtgtccctggaatcctccaacctctgc

SEQ ID NO: 41 - DNA, 174 bp, synthetic construct
  misc_feature 1..174: note = Description of Artificial Sequence: Synthetic polynucleotide
  source 1..174: mol_type = other DNA
acccccgagcccccgcagccctagagccgcccaagggatggcgatggcgtacttggcttggagactggcgcggcgttcgtgtccgaggtcactagtttcccggtagttcagctgcacatgaatagaacagcaatgagagccagtcagaaggactttgaaaattcaatgaatcaa

SEQ ID NO: 42 - DNA, 174 bp, synthetic construct
  misc_feature 1..174: note = Description of Artificial Sequence: Synthetic polynucleotide
  source 1..174: mol_type = other DNA
acccgagcaccttctcttcactcagccaactgctcgctcgctcacctccctcctctgcaccatgaccacctgcagccgccagttcacctcctccagctccatgaagggctcctgcggcatcgggggcggcatcgggggcggctccagccgcatctcctccgtcctggccggagg

SEQ ID NO: 43 - DNA, 174 bp, synthetic construct
  misc_feature 1..174: note = Description of Artificial Sequence: Synthetic polynucleotide
  source 1..174: mol_type = other DNA
accggattttccttctccctctctctatctccacagatcccttcccaagaggagtctcctgctaaaacttcatcatctcaagttgacctgccacttcacccaaggaggcaagctcttgcctgtaacagtgtatttgccaacatggcacccaaaaagaagattgtcaaaaagaac

SEQ ID NO: 44 - DNA, 174 bp, synthetic construct
  misc_feature 1..174: note = Description of Artificial Sequence: Synthetic polynucleotide
  source 1..174: mol_type = other DNA
acctaactccaacccccgcaattctcgctcccttcacctgatgattcagggctgaacaaggccaggatgtccattctaggcccatcggtgctgtcttgctgaaggttgggtcaggcatctaaagggactgtggtaagggagggtgtgacacaggtgtaagctgccatcgtcatc

SEQ ID NO: 45 - DNA, 174 bp, synthetic construct
  misc_feature 1..174: note = Description of Artificial Sequence: Synthetic polynucleotide
  source 1..174: mol_type = other DNA
acctgttgtctctcacctctacattggatcacatggtcacctgcctcatggaaatgccttttttaaaacttcgatttgcagaactccactatttttatacctagctacagttttgagaaagaagaatcagaaccctgacccacttacggttgctgggacaattccccctcccgc

SEQ ID NO: 46 - DNA, 174 bp, synthetic construct
  misc_feature 1..174: note = Description of Artificial Sequence: Synthetic polynucleotide
  source 1..174: mol_type = other DNA
acgacaatatggcggcgcttagttgcatgaaggcggaaactctgtgacttcgggtccgtagtggggcctgcggtgggagtgggaaggaaggcggagggaaccatgcgaggttctgagaattgcggcgagggtcgcctcgagagacggtttctgagcatcatcgtgctggatgat

SEQ ID NO: 47 - DNA, 174 bp, synthetic construct
  misc_feature 1..174: note = Description of Artificial Sequence: Synthetic polynucleotide
  source 1..174: mol_type = other DNA
acgactgcgtgggtgagtcgtctataaaaactcatctctgcgcgtctcttcgccacattcgcttcctgctttcggtgtgtctgttgtgtcttgttgcgggcaccgcagtcgccgtgaagatggcgtctaccagccgtttggatgctcttccaagagtcacatgtccaaaccatc

SEQ ID NO: 48 - DNA, 174 bp, synthetic construct
  misc_feature 1..174: note = Description of Artificial Sequence: Synthetic polynucleotide
  source 1..174: mol_type = other DNA
acgcttgcgcgcgggatttaaactgcggcggtttacgcggcgttaagacttcgtagggttagcgaaattgaggtttcttggtattgcgcgtttctcttccttgctgactctccgaatggccatggactcgtcgcttcaggcccgcctgtttcccggtctcgctatcaagatcca

SEQ ID NO: 49 - DNA, 174 bp, synthetic construct
  misc_feature 1..174: note = Description of Artificial Sequence: Synthetic polynucleotide
  source 1..174: mol_type = other DNA
acggaaacagaaattgctttgcggcccgcacggaaattgctttccttcggcttccgttcttggtccatgtgagagaagctggctgctgaaatgactgcgaaccggcttgcagagagccttctggctttgagccaacaggaagaactagcggatttgccaaaagactacctcttg

SEQ ID NO: 50 - DNA, 174 bp, synthetic construct
  misc_feature 1..174: note = Description of Artificial Sequence: Synthetic polynucleotide
  source 1..174: mol_type = other DNA
acggcggggggcgtgccccctcccagcccagcctccccaacccggcccgcccgccgcgtcgcgggggcatgtgagcgggaagcctaggctgccagccgcgaggaccgcacggaggaggagcaggagcgcggagccgcgagccccgagccccgagcccggcgcctggctgagtag

SEQ ID NO: 51 - DNA, 174 bp, synthetic construct
  misc_feature 1..174: note = Description of Artificial Sequence: Synthetic polynucleotide
  source 1..174: mol_type = other DNA
acgtcaccggctgcgcccttcagtatcgcggacggaagatggcgtccgccacccgtctcatccagcggctgcggaactgggcgtccgggcatgacctgcaggggaagctgcagctacgctaccaggagatctccaagcgaactcagcctcctcccaagctccctgtgggtccta

SEQ ID NO: 52 - DNA, 174 bp, synthetic construct
  misc_feature 1..174: note = Description of Artificial Sequence: Synthetic polynucleotide
  source 1..174: mol_type = other DNA
acgtccggcttaccgtcgtttacgacagtgtcaggatcgcgggcttgctttccggtagcgtgggctgacgcctcgctcaatttctcacagggctgcgcaggtttcccccgtctgcgaatggaccactggaggggttcaaaggttcgcgtcccagtacgggaatgagcctctttg

SEQ ID NO: 53 - DNA, 174 bp, synthetic construct
  misc_feature 1..174: note = Description of Artificial Sequence: Synthetic polynucleotide
  source 1..174: mol_type = other DNA
acgtgtgtatgtgtgtgtgtgtgtattgggtttctctctcccttgtaagaacacagccagcccgccctctcctgctgttgctgcagctctgacttgctttttcctgcctccttcctctcctctctcttcttgcttagcttcttgccttctgatactactcccaagatggaggct

SEQ ID NO: 54 - DNA, 174 bp, synthetic construct
  misc_feature 1..174: note = Description of Artificial Sequence: Synthetic polynucleotide
  source 1..174: mol_type = other DNA
actccactagggcacgcaggcgacgagcacactggcagagggcctcccgcagggcccactccccacctggctctcgccccaccatggcccgggaagcaggccaggtttgtgccaggcctgccgtgcccagggggaggaagggctctgtgttctttgcctgtgtctctgtggtga

SEQ ID NO: 55 - DNA, 174 bp, synthetic construct
  misc_feature 1..174: note = Description of Artificial Sequence: Synthetic polynucleotide
  source 1..174: mol_type = other DNA
actcgccctccagcttctgccctgcctgctgtgtgcggagccgtccagcgaccaccatggtgaggctcgtgctgcccaaccccggcctagacgcccggatcccgtccctggctgagctggagaccatcgagcaggaggaggccagctcccggccgaagtgggacaacaaggcgc

SEQ ID NO: 56 - DNA, 174 bp, synthetic construct
  misc_feature 1..174: note = Description of Artificial Sequence: Synthetic polynucleotide
  source 1..174: mol_type = other DNA
actgctttcctgggagtcaagttaaaacttctctcctgtgaccttgtcacccggcagtggaaagttacccttggctgcagccacgacttccgcatactcttcagaacttgctctgcccttgagttttccagctttcctttaatgcactaaacctttaatattgtattctcctaa

SEQ ID NO: 57 - DNA, 174 bp, synthetic construct
  misc_feature 1..174: note = Description of Artificial Sequence: Synthetic polynucleotide
  source 1..174: mol_type = other DNA
actggaaagttcaagagtgtctttgctggctctttcttgaatatttccaaagccttggaagttacaggttttgggtgtgggataaggaaaaactgaatgatagagcacaggtaccgctcccctttcctcatcatgcctctctgtcgcctctttgttcatagttgaccacggcat

SEQ ID NO: 58 - DNA, 174 bp, synthetic construct
  misc_feature 1..174: note = Description of Artificial Sequence: Synthetic polynucleotide
  source 1..174: mol_type = other DNA
acttccgcgggcacccaactgtgcgtctcctgcgcgctgacgtcaggtgcgtgcccctgtccggcagccgaggagaccccgcgcagtgctgccaacgccccggtggagaagctgaggtcatcatcagatttgaaatatttaaagtggatacaaaactatttcagcaatgcagac

SEQ ID NO: 59 - DNA, 174 bp, synthetic construct
  misc_feature 1..174: note = Description of Artificial Sequence: Synthetic polynucleotide
  source 1..174: mol_type = other DNA
acttccgggatctgtcagccgctccctctgggcttccgtcctccgcccgcgcccgacggagcctgttcgcgtcgactgcccagagtccgcgaatcctccgctccgagcccgtccggactcccccgatcccagctttctctcctttgaaaacactaagaataatgtcactgcatc

SEQ ID NO: 60 - DNA, 174 bp, synthetic construct
  misc_feature 1..174: note = Description of Artificial Sequence: Synthetic polynucleotide
  source 1..174: mol_type = other DNA
actttactgcaagccttagtcagagtacaaagggttcctgcttggtggttttgctgcagcttcagagtttagcctgaactgtggcaggattttgtaacttgcacattttttgagaagtctgatggaggtataatgtccacggtcgattatttgaacagtgtttctggagatcat

SEQ ID NO: 61 - DNA, 174 bp, synthetic construct
  misc_feature 1..174: note = Description of Artificial Sequence: Synthetic polynucleotide
  source 1..174: mol_type = other DNA
agaacagtttcatttccggagccaccggaagcagcttgcaaatggcgtctccctcgctggagcggccagaaaaaggcgctggaaaaagtgaatttcgtaaccagaagccgaagccggagaaccaagatgaatcagaactccttacggttcctgatggttggaaggaaccagctt

SEQ ID NO: 62 - DNA, 174 bp, synthetic construct
  misc_feature 1..174: note = Description of Artificial Sequence: Synthetic polynucleotide
  source 1..174: mol_type = other DNA
agaaccttcaactgtcaagcaccgagctagccaccagcatgctgtactccccagggccgagtcttccggagtcagcagagagcctggatggatcacaggaggataagcctcggggctcatgtgcggagcccacttttactgatacgggaatggtggctcacataaacaacagcc

SEQ ID NO: 63 - DNA, 174 bp, synthetic construct
  misc_feature 1..174: note = Description of Artificial Sequence: Synthetic polynucleotide
  source 1..174: mol_type = other DNA
agacaatagaaagcaatgcgcctattcacatggagaatcttccctttcctctaaaattacttagtgcctcatcactaaacacccccagctccacaccatgggtgttggatatcttcctcaccttggtgtttgccctggggttcttcttcctattactcccctacttctcttacc

SEQ ID NO: 64 - DNA, 174 bp, synthetic construct
  misc_feature 1..174: note = Description of Artificial Sequence: Synthetic polynucleotide
  source 1..174: mol_type = other DNA
agacttcctccttcacttgcctggacgctgcgccacatcccaccggcccttacactgtggtgtccagcagcatccggcttcatggggggacttgaaccctgcagcaggctcctgctcctgcctctcctgctggctgtaagtgattgcagttgctctacggtgagcccgggcgtg

SEQ ID NO: 65 - DNA, 174 bp, synthetic construct
  misc_feature 1..174: note = Description of Artificial Sequence: Synthetic polynucleotide
  source 1..174: mol_type = other DNA
agacttggtatagtgggagagcctgactgaggtggctctagccagtctaattgccgttcctttagctagtggcatcttgattcctgctgtgtcttaactgaccattgtcttaaattctagagtggatcatgacccatgaagagcaccatgcagccaaaaccctggggattggca

SEQ ID NO: 66 - DNA, 174 bp, synthetic construct
  misc_feature 1..174: note = Description of Artificial Sequence: Synthetic polynucleotide
  source 1..174: mol_type = other DNA
agagaaggagccagggagggtggcagggaggccacgtgatccgagtcccctcacccctttccttcccacaggtccctggccaaagatttatttctcttgacaaccaagggcctccgtctggatttccaaggaagaatttcctctgaagcaccggaacttgctactaccagcacc

SEQ ID NO: 67 - DNA, 174 bp, synthetic construct
  misc_feature 1..174: note = Description of Artificial Sequence: Synthetic polynucleotide
  source 1..174: mol_type = other DNA
agagacacgaatatgtttcagccgcaacaggctgcgtttcagccggaagagtgaaagggcaccttgaaaacgcaagtttatgaatatgtttctgtactttcagaccatcatcaaagaggggatgctgaccaaacagaacaattcattccagcgatcaaaaaggagatactttaa

SEQ ID NO: 68 - DNA, 174 bp, synthetic construct
  misc_feature 1..174: note = Description of Artificial Sequence: Synthetic polynucleotide
  source 1..174: mol_type = other DNA
agagccggcgccgtcaccgcccgcattgccgctcccagtcccgcgctcggcacgacatgaaatcccccgacgaggtgctacgcgagggcgagttggagaagcgcagcgacagcctcttccagctatggaagaagaagcgcggggtgctcacctccgaccgcctgagcctgttcc

SEQ ID NO: 69 - DNA, 174 bp, synthetic construct
  misc_feature 1..174: note = Description of Artificial Sequence: Synthetic polynucleotide
  source 1..174: mol_type = other DNA
agaggaggagggcacttttgtgtgatggcaacttcacttctagggcgtggtgcttgctcccgaatcagacgccggcagccaaacttgtcccctcctgtagagtaggaagcggccgggcgccggggctgttgggggtgccaggaagaaccgaggttgggatcgactcctctggcc

SEQ ID NO: 70 - DNA, 174 bp, synthetic construct
  misc_feature 1..174: note = Description of Artificial Sequence: Synthetic polynucleotide
  source 1..174: mol_type = other DNA
agagtggactgagcagccagtaggggagagagcagttaaggcacacagagcaccagctccctcctgcctgaagatgttccaccaaatttgggcagctctgctctacttctatggtattatccttaactccatctaccagtgccctgagcacagtcaactgacaactctgggcgt

SEQ ID NO: 71 - DNA, 174 bp, synthetic construct
  misc_feature 1..174: note = Description of Artificial Sequence: Synthetic polynucleotide
  source 1..174: mol_type = other DNA
agatggcgtgcttgttggagaccccaatccgcatgagcgtcctttcgtttttttaaagaaaaagacgactttcacctttcactatgttgctcttgaaccaggaccaggaatgaaagttactgggagataacttcgaaggattttgcaacaaattcgagctgtccgactctgaga

SEQ ID NO: 72 - DNA, 174 bp, synthetic construct
  misc_feature 1..174: note = Description of Artificial Sequence: Synthetic polynucleotide
  source 1..174: mol_type = other DNA
agattgctgaattacgtgcctccttcggagaaccccacccagtcccgggcccagggcagtaacttgcccattggaaaggggaaagcagaggccacactcagtgacaatggccacaaggaacattggctagcatgtggatgacctctgtttccttacaggctctgaagcccttcc

SEQ ID NO: 73 - DNA, 174 bp, synthetic construct
  misc_feature 1..174: note = Description of Artificial Sequence: Synthetic polynucleotide
  source 1..174: mol_type = other DNA
agattgtttcacatcaccagtgtatcctcagctcctaacactgtgtctggtacacattgtttgatggttttgatgtttcagattcgttatatttcacaaacacaaggcttgccagctgaatatcttctcagtgccggaacaaaaacaaccaggtttttcaacagagatcctaat

SEQ ID NO: 74 - DNA, 174 bp, synthetic construct
  misc_feature 1..174: note = Description of Artificial Sequence: Synthetic polynucleotide
  source 1..174: mol_type = other DNA
agcaagtccgcggtaagcgctgacgcatgcgcatagctaaccgcacccggttcagctcgcctttcttggccagaggcgccggttggactcacgggcggggcatgatggtggtgggtacgggcacctcgctggcgctctcctccctcctgtccctgctgctctttgctgggatgc

SEQ ID NO: 75 - DNA, 174 bp, synthetic construct
  misc_feature 1..174: note = Description of Artificial Sequence: Synthetic polynucleotide
  source 1..174: mol_type = other DNA
agcacacacacatctgcacctcaaccacagactacacttgctgaactggctcctggggccatgaggctgtcactgccactgctgctgctgctgctgggagcctgggccatcccagggggcctcggggacagggcgccactcacagccacagccccacaactggatgatgaggag

SEQ ID NO: 76 - DNA, 174 bp, synthetic construct
  misc_feature 1..174: note = Description of Artificial Sequence: Synthetic polynucleotide
  source 1..174: mol_type = other DNA
agcacgtcctgttttcgttggccgcgctgggatggccgccacagctgtaggtgctgctagtgtttagcgctggtctttgccgggcgttgagggcagctcagcctccttgtttgtccggttcgcctgtgcgtggtactcaagggcaccagtattcccgcggtcggcagcatgggt

SEQ ID NO: 77 - DNA, 174 bp, synthetic construct
  misc_feature 1..174: note = Description of Artificial Sequence: Synthetic polynucleotide
  source 1..174: mol_type = other DNA
agcatggtggttgataaccgaagggcaaaagcatcacttatttagtgtgtgttatagaaattttttagacaaccttactagctaacccaggtgaccctttacggatttctttcaaagccaatttgaataaacaactcttccctctcaaatgggcaagagtaactcttcagcacc

SEQ ID NO: 78 - DNA, 174 bp, synthetic construct
  misc_feature 1..174: note = Description of Artificial Sequence: Synthetic polynucleotide
  source 1..174: mol_type = other DNA
agccaattctgaccgtgtcaacgaatcatccacgcacctgcagctctgctgagagagtgcaagccgtgggggttttgagctcatcttcatcattcatatgaggaaataagtggtaaaatccttggaaatacaatgagactcatcagaaacatttacatattttgtagtattgtt

SEQ ID NO: 79 - DNA, 174 bp, synthetic construct
  misc_feature 1..174: note = Description of Artificial Sequence: Synthetic polynucleotide
  source 1..174: mol_type = other DNA
agccagggagagggtgtgagggcagatctgggggtgcccagatggaaggaggcaggcatgggggacacccaaggccccctggcagcaccatgaactaagcaggacacctggaggggaagaactgtggggacctggaggcctccaacgactccttcctgcttcctggacaggact

SEQ ID NO: 80 - DNA, 174 bp, synthetic construct
  misc_feature 1..174: note = Description of Artificial Sequence: Synthetic polynucleotide
  source 1..174: mol_type = other DNA
agcccaagatttctagggcattggccgcgctgctgggtgatccctccgggctcaagttgcaagggggcgggccgggccggaggtggagtctcccgccaattgaagcctccgctataaattgaactccctgcactgctgaagcccagatgcctcgccaggccacgtcgcggttgg

SEQ ID NO: 81 - DNA, 174 bp, synthetic construct
  misc_feature 1..174: note = Description of Artificial Sequence: Synthetic polynucleotide
  source 1..174: mol_type = other DNA
agccctgcattccttacccttggttggattcttcccgggctgggagaaatgaccgcttctatgaggagaccatgtgccgaggtcgtgtgctaggaagccagttgctgtgagaaatgaccagtgtcatgtctgtctttcagccaccctacatcatgtagcagttcttctgagatc

SEQ ID NO: 82 - DNA, 174 bp, synthetic construct
  misc_feature 1..174: note = Description of Artificial Sequence: Synthetic polynucleotide
  source 1..174: mol_type = other DNA
agccctttgtctgaaggtgctgcgggatgccgttccttcgcgcgtgaggctgcggctctgacgccccataggctccttcaatttccgtgatcctcggagtccccaggagaccaggtgatggcagcagccagactcctgccagtgccggcaggaccccaggccaagctgaccttc

SEQ ID NO: 83 - DNA, 174 bp, synthetic construct
  misc_feature 1..174: note = Description of Artificial Sequence: Synthetic polynucleotide
  source 1..174: mol_type = other DNA
agccgggattgggcagagggcggggcggcggagggattgcggcggcccgcagcgggataaccttgaggctgaggcagtggctccttgcacagcagctgcacgcgccgtggctccggatctcttcgtctttgcagcgtagcccgagtcggtcagcgccggaggacctcagcagcc

SEQ ID NO: 84 - DNA, 174 bp, synthetic construct
  misc_feature 1..174: note = Description of Artificial Sequence: Synthetic polynucleotide
  source 1..174: mol_type = other DNA
agcctgcctgtctgcatggtccgcctagaggtttgagcagctgggcatggaagaagcgagccacacccccatcgcatgccctatgaacgggataagggaactttttcacttcaccactatgcctgactaattttttaattaaaaaaaatttttttgtagaaacagagtttcacc

SEQ ID NO: 85 - DNA, 174 bp, synthetic construct
  misc_feature 1..174: note = Description of Artificial Sequence: Synthetic polynucleotide
  source 1..174: mol_type = other DNA
agcctttttcccagcttccttgcaccatggacagctcccattaagccacctctccatcctggggccaggactcttatgccccattcctgtcaaattgagatttcatccaccattctccaaggacagtgaagttataccctagttccagtgttgggatcagtggcccctctggac

SEQ ID NO: 86 - DNA, 174 bp, synthetic construct
  misc_feature 1..174: note = Description of Artificial Sequence: Synthetic polynucleotide
  source 1..174: mol_type = other DNA
agcggctgcagcatccagccagcttggatgtctggcctgtgagcctggggaaactattattaataatatttactgttgataatattggggaaaacagcccttaactctgaggtttctgctgtgctcctttccaaaacagacttccaggactctgaagaaacagttacaagcagg

SEQ ID NO: 87 - DNA, 174 bp, synthetic construct
  misc_feature 1..174: note = Description of Artificial Sequence: Synthetic polynucleotide
  source 1..174: mol_type = other DNA
agctagtccactaggtgctaatcaaatgctgtgttacaacactgtgaggttttcccagttataagtgtcactattagggttttttttaattgcaaagccaaataaggctgtcaattgcatcatcttaccttatttcttcagattaagtactgtttatagtgggatttttggtgg

SEQ ID NO: 88 - DNA, 174 bp, synthetic construct
  misc_feature 1..174: note = Description of Artificial Sequence: Synthetic polynucleotide
  source 1..174: mol_type = other DNA
agctcctgaggtgtagacgccaactctctctagctcgctagtgggttgcaggaggtgcttacgcatgtttgtttctttgctgccgtcttccagttgctttatctgttcacttgtgccctgactttcaactctgtctccttcctcttcctacagtactcccctgccctcaacaag

SEQ ID NO: 89 - DNA, 174 bp, synthetic construct
  misc_feature 1..174: note = Description of Artificial Sequence: Synthetic polynucleotide
  source 1..174: mol_type = other DNA
agctgctgcggcaccagggctccaagactggccgttcagactgctaggtttagcttcaggggcagcccagggcagtgttgctgcatattgcatggatgaaaggctgaaggctgcctcctcttgcaggctggcttctgagattgcaccttcttctcctgctactcctccaaatct

SEQ ID NO: 90 - DNA, 174 bp, synthetic construct
  misc_feature 1..174: note = Description of Artificial Sequence: Synthetic polynucleotide
  source 1..174: mol_type = other DNA
agcttcgacggccgccattttctttctttcttagctgttagctgagaggaagtctctgaacaggcggcagcggctcttatagtgcaaccatggcagactattcaacagtgcctcccccctcttctggctcagctggtggcggtggtggcggcggtggtggtggaggagttaacg

SEQ ID NO: 91 - DNA, 174 bp, synthetic construct
  misc_feature 1..174: note = Description of Artificial Sequence: Synthetic polynucleotide
  source 1..174: mol_type = other DNA
aggaaaaaacctccaagagagctagggttcctctcagagaggaaagacaggtccttaggtcctcaccctcccgtctccttgcccttgcagttctgggaactggacagattggacaactataacgacacctccctggtggaaaatcatctctgccctgccacagaggggcccctc

SEQ ID NO: 92 - DNA, 174 bp, synthetic construct
  misc_feature 1..174: note = Description of Artificial Sequence: Synthetic polynucleotide
  source 1..174: mol_type = other DNA
aggaagcggaggaaggtgaagtaggaccgaattcctgtgccgaagaggcctgcagtgggagagcaggatgggggctccggaggtggcgcccaggctctgagctaccctaggtctgcagactagcgggcattggccagagacatggcccagccactggccttcatcctcgatgtc

SEQ ID NO: 93 - DNA, 174 bp, synthetic construct
  misc_feature 1..174: note = Description of Artificial Sequence: Synthetic polynucleotide
  source 1..174: mol_type = other DNA
aggaaggtgatgcttaagctgagctctgaggaatgatgaagaatgagctcggcgaagggggtgctggtgtttgatgcagggctcagagatggcctgatatgaaggagtcacgcctcccgcctcccggagctgcccagtggctgccttgtccttcaagtgcaggagctggttcaa

SEQ ID NO: 94 - DNA, 174 bp, synthetic construct
  misc_feature 1..174: note = Description of Artificial Sequence: Synthetic polynucleotide
  source 1..174: mol_type = other DNA
aggaggaagggtcactgctgtctccggaagctcttggctgcaaagagagaggatcccgggtatctccctccttacaaccaccgccacctcctagtgccttagaagccactgacagcccccagggcaggtgagccctgcatctggaataaggatccagaggtctcgttcaggacc

SEQ ID NO: 95 - DNA, 174 bp, synthetic construct
  misc_feature 1..174: note = Description of Artificial Sequence: Synthetic polynucleotide
  source 1..174: mol_type = other DNA
aggcactgtgccaagtattttgcttcgatgatttcacgtcatcttcaaaacaacctcatgagggctgggtcagttagaacctaaacaaactagagacctggttgcaacccctcaggctctgctgatgctgtccccctttgttcctgcagcgtggaccctgccagcagccaggcc

SEQ ID NO: 96 - DNA, 174 bp, synthetic construct
  misc_feature 1..174: note = Description of Artificial Sequence: Synthetic polynucleotide
  source 1..174: mol_type = other DNA
aggccacagtaccctattcacgctctgtgcttgtgccaaggtttcaagtgatcctcccgcctcagcctgcccaggtgctgagattacatgtatgagccactgcacctggaaaggagccagaaatgtgaagtgctagctgaaggatgagcagcagctagccaggcaaagggggca

SEQ ID NO: 97 - DNA, 174 bp, synthetic construct
  misc_feature 1..174: note = Description of Artificial Sequence: Synthetic polynucleotide
  source 1..174: mol_type = other DNA
aggccgcggcccagctgaccctcggggctcccccggcagcggacagggaagggttaaaggcccccggctccctgccccctgccctggggaacccctggccctgtggggacatgaactagggacaaattcccagctgacggggaccacaacctggattccctgcccaccctggcc

SEQ ID NO: 98 - DNA, 174 bp, synthetic construct
  misc_feature 1..174: note = Description of Artificial Sequence: Synthetic polynucleotide
  source 1..174: mol_type = other DNA
aggcgcgggccctggcaggtcctttctcgaggcagggggcacggtagcacagggagcttctctttgtgggcgggcgcgaggcccgctagggggttatactggggaacgtgcctgcgcgtgcttggatagttcatttaaagcccccatccctgcaaggtggtgctttctaccaat

SEQ ID NO: 99 - DNA, 174 bp, synthetic construct
  misc_feature 1..174: note = Description of Artificial Sequence: Synthetic polynucleotide
  source 1..174: mol_type = other DNA
agggaggaggaaggatgggcggtgttggcgtagccgcagggaggtgactgaagcgagcctggcctcttgcatcctccgcctgtgtacctccctcccctttttttccgccttctgccagcagaagcagcagccgcagcacctgagccgctactgccgctcactcaggacaacgct

SEQ ID NO: 100 - DNA, 174 bp, synthetic construct
  misc_feature 1..174: note = Description of Artificial Sequence: Synthetic polynucleotide
  source 1..174: mol_type = other DNA
aggggcactgctctgtccgagtgctgcccttggggcgaggcgggcatgtggctctacaaggtggagtccaggcggccaaagtttggaaaggactttccttatcccagttgattgtgcagaatacactgcctgtcgcttgtcttctattcaccatggcttcttctgatatccagg

SEQ ID NO: 101 - DNA, 174 bp, synthetic construct
  misc_feature 1..174: note = Description of Artificial Sequence: Synthetic polynucleotide
  source 1..174: mol_type = other DNA
agggggacactatttctggtactcccaggaggctgcgggtcgatgctcgtgccagcctgggacccaggcagcacggtttctctcccaaattgtgccagagaacacgcacgtcctggttttcattgttccccgcctcctgcgactcgtttgtggttaaaattataagacctaatt

SEQ ID NO: 102 - DNA, 174 bp, synthetic construct
  misc_feature 1..174: note = Description of Artificial Sequence: Synthetic polynucleotide
  source 1..174: mol_type = other DNA
agggtgtcccaagccccttgggtcgcgtatctggctggatccagcctctccgcatcttgatcttttcccctcttctaggaggcatccctacaccctatgactacaggcctgattctcttctttcagtcagggcgacccttgggcgctggagtacgcttgggactggggctgcga

SEQ ID NO: 103 - DNA, 174 bp, synthetic construct
  misc_feature 1..174: note = Description of Artificial Sequence: Synthetic polynucleotide
  source 1..174: mol_type = other DNA
agtaggacaatatgagactctggggcagtgaaagacttaccaggattccttctggaactgactcgtcagctcattcatgtcttacccagtctttaaacagtatttcatgataatggtctgcttttaattgctgggctttaccttaccctttttgtgattgcaggtcctacaggt

SEQ ID NO: 104 - DNA, 174 bp, synthetic construct
  misc_feature 1..174: note = Description of Artificial Sequence: Synthetic polynucleotide
  source 1..174: mol_type = other DNA
agtaggagtggagagcgtgcgtgagtgagtgtgtgtgtgtgtgtgtgtgtgtgtgcatgcgtgtgtgaagaatgcacactatctcctgttggtaagtgtgtgcttactccctgaccagatgctgcggtgcacggggcagccaccatctctgcatgcatgtctgtgatgtcttcc

SEQ ID NO: 105 - DNA, 174 bp, synthetic construct
  misc_feature 1..174: note = Description of Artificial Sequence: Synthetic polynucleotide
  source 1..174: mol_type = other DNA
agtatgcaggtcgctgcagggacccgaggcgacacgcgcctgcaggaggtggcactcctgccgcagctcttcgatctgcttgtccttggccagcggcgcgctcgcctgctccgacaggtcccgagcgcgctggcgggcaaagacttggcacagctccaggccggcgcaactctc

SEQ ID NO: 106 - DNA, 174 bp, synthetic construct
  misc_feature 1..174: note = Description of Artificial Sequence: Synthetic polynucleotide
  source 1..174: mol_type = other DNA
agtcacttctgttcatttttaatgaaaacctattgctgttattttctattatgagttaacggtgatgtgtgttttttaaattttgtatacttgctctcaccctaaaatataccttaagagacttttcccctgtttttctttctgctttccaagactccaggaaaaacagcttcc

SEQ ID NO: 107 - DNA, 174 bp, synthetic construct
  misc_feature 1..174: note = Description of Artificial Sequence: Synthetic polynucleotide
  source 1..174: mol_type = other DNA
agtcatccccaaaacgaggggatatcagcttaccgaggccgcaggttttcctagtccctacctcatagatatgtaggacatccccgggcccggaatgcggctctctgaccctctctgtgccctcccccgccccccgaaccaggcttggcgggcggaggcgccagcggatgtctc

SEQ ID NO: 108 - DNA, 174 bp, synthetic construct
  misc_feature 1..174: note = Description of Artificial Sequence: Synthetic polynucleotide
  source 1..174: mol_type = other DNA
agtccgtggatctcacaaaaatgtttgctgacccttgacattgacaaactgctgacagctcagatgatccatgattggaaggatgtggtcatcaccaagatgtctttctttctccggttcccagttttccagacctgaagtgttttccaatcaaagcgaagagacgatctgtgg

SEQ ID NO: 109 - DNA, 174 bp, synthetic construct
  misc_feature 1..174: note = Description of Artificial Sequence: Synthetic polynucleotide
  source 1..174: mol_type = other DNA
agtgccgccactggaaccaggagatgcggcgcaggagctgtcgctgtgtttgctttaacctgagtcttgttccttattgtggttcctgctgtggttttgatcatgttgttaccctcggacgtagcccggcttgtattgggttacttacagcaagaaaacctcatttctacctgc

SEQ ID NO: 110 - DNA, 174 bp, synthetic construct
  misc_feature 1..174: note = Description of Artificial Sequence: Synthetic polynucleotide
  source 1..174: mol_type = other DNA
agtgtcctggttactgcagcggcagcaacagcaggtcctactatcgcctccctctagtctctgcttctctggatccctgaggagggcagaaggaagaaaacagcccaaagatgagagtgattcgcgtgggtacccgcaagagccagcttgctcgcatacagacggacagtgtgg

SEQ ID NO: 111 - DNA, 174 bp, synthetic construct
  misc_feature 1..174: note = Description of Artificial Sequence: Synthetic polynucleotide
  source 1..174: mol_type = other DNA
agttcacccaatggacctgcctactgcagcgtaggcctcgcctcaacggcaggagagcaggcggctgcggttgctgcagccttcagtctccacccggactacgccatgttggggtttgtgggtcgggtggccgctgctccggcctccggggccttgcggagactcaccccttca

SEQ ID NO: 112 - DNA, 174 bp, synthetic construct
  misc_feature 1..174: note = Description of Artificial Sequence: Synthetic polynucleotide
  source 1..174: mol_type = other DNA
agttctcaggctcacattcccaccacccacctctgagcccagccctccctagcatcaccacttccatcccattcctcagccaagagccaggaatcctgattccagatcccacgcttccctgcctccctcaggtcccagctcttgctcctgcctgtttgcctggaaatggccacg

SEQ ID NO: 113 - DNA, 174 bp, synthetic construct
  misc_feature 1..174: note = Description of Artificial Sequence: Synthetic polynucleotide
  source 1..174: mol_type = other DNA
agttgccctgtcagtgcaggtggaggccccggcggggcaaagtggcaggaacctcttaaagggcgagagcggcgcggagccagaacgcggtcggcccggtccccgccgcacccagcccagcaacatcatgacaacagagaagagtttagtgactgaggccgaaaattcacagca

SEQ ID NO: 114 - DNA, 174 bp, synthetic construct
  misc_feature 1..174: note = Description of Artificial Sequence: Synthetic polynucleotide
  source 1..174: mol_type = other DNA
agtttgcttggagctcctggggcctaacaaaaagaaacctgccatgctgctcttcctcctctctgcactggtcctgctcacacagcccctgggctacctggaagcagaaatgaagacctactcccacagaacaatgcccagtgcttgcaccctggtcatgtgtagctcagtgga

SEQ ID NO: 115 - DNA, 174 bp, synthetic construct
  misc_feature 1..174: note = Description of Artificial Sequence: Synthetic polynucleotide
  source 1..174: mol_type = other DNA
ataaaccgacgtttagccagaccatcttgattcaaaacatctatcgtaatccccaaaacagtgcacagacggctgacggctcacactaccattgccctcttgaacatttaccgtaaccctcaaaactcttcccagtctgctgacggtttgcgctgtgccgtgagcgatgtggag

SEQ ID NO: 116 - DNA, 174 bp, synthetic construct
  misc_feature 1..174: note = Description of Artificial Sequence: Synthetic polynucleotide
  source 1..174: mol_type = other DNA
ataggccccgcccctgtatcccaagaccctgcctcctcttgcggtggggggaaagcggcctcttactctaggcctttcggtttgcgcgagcgggcaggaaagcgtgcgtgcggctaagagagtgggcgctctcgcggccgctgacgatggaagaactggagcaaggcctgttga

SEQ ID NO: 117 - DNA, 174 bp, synthetic construct
  misc_feature 1..174: note = Description of Artificial Sequence: Synthetic polynucleotide
  source 1..174: mol_type = other DNA
atcagcccaaaggtaggctcaggctccgacggtggccggcgggggtcacgaggcttcgtagtggaggaacgggtttggcgtgtgggacgcagctgcctctgtactggggagtcacggagtggccgggctccagggacatggcggcggcctctgcggtgtcggtgctgctggtgg

SEQ ID NO: 118 - DNA, 174 bp, synthetic construct
  misc_feature 1..174: note = Description of Artificial Sequence: Synthetic polynucleotide
  source 1..174: mol_type = other DNA
atccaggtctctgtgctccacacttgtctttcgtgctccatgtttgaagaaattaatattgtggaagaacagttttaaggcttagaggaacttgagttaggatccgtacttggcagatgaggaaattgattctcatggatgtaaattcactgtttgaggccacaacagggcatc

SEQ ID NO: 119 - DNA, 174 bp, synthetic construct
  misc_feature 1..174: note = Description of Artificial Sequence: Synthetic polynucleotide
  source 1..174: mol_type = other DNA
atccatttgttctcaagaggtagcaagaaacagtatccacagtggactccggggctcctacagacttggcacagcttcctacagtcttgaaacagccctgttgttctgtcatggccagtgggcagtttgtgaacaaactgcaagaggaagtgatctgccccatctgcctggaca

SEQ ID NO: 120 - DNA, 174 bp, synthetic construct
  misc_feature 1..174: note = Description of Artificial Sequence: Synthetic polynucleotide
  source 1..174: mol_type = other DNA
atcccagcagactgtgcagtggggcaaggatttcatgagcatcctcctctaaacgcgtgtcaagacaaaagatgcttcagctttggaaacttgttctcctgtgcggcgtgctcactgggacctcagagtctcttcttgacaatcttggcaatgacctaagcaatgtcgtggata

SEQ ID NO: 121 - DNA, 174 bp, synthetic construct
  misc_feature 1..174: note = Description of Artificial Sequence: Synthetic polynucleotide
  source 1..174: mol_type = other DNA
atcccagccgccagaattcgaggtctgcggcggctttcaaaacttgacaactttcctttccaggaggaccccgttctggagcgttatttcaaaggccacaaagctgcgatcacctccttggacctcagccccaacggcaagcaacttgctactgcttcttgggatacctttctc

SEQ ID NO: 122 - DNA, 174 bp, synthetic construct
  misc_feature 1..174: note = Description of Artificial Sequence: Synthetic polynucleotide
  source 1..174: mol_type = other DNA
atccggcgcggtgtttagactccactgatgtcgtggcgctttaggggaagaagttggtgtttcgctgggccctggtactgaagacggggtccgggtcgcccctagctgtttcctactcacccaaagccccgcacccgccttttctctctctcctctggcaggatgaggcgtgca

SEQ ID NO: 123 - DNA, 174 bp, synthetic construct
  misc_feature 1..174: note = Description of Artificial Sequence: Synthetic polynucleotide
  source 1..174: mol_type = other DNA
atccgggcaggataaaggcctgggtgaggcggctcacctaccctgctttctgcattcttctctccacatccctctctgtacttacagcccccaatggcccccaaaaagccagagcccaagaaggatgatgccaaggcagcccccaaggcagctccagctcccgcacctccccct

SEQ ID NO: 124 - DNA, 174 bp, synthetic construct
  misc_feature 1..174: note = Description of Artificial Sequence: Synthetic polynucleotide
  source 1..174: mol_type = other DNA
atcctgatttaaacgtcagtagataagtgtattttattgatagaagatgttgaatttcttctgttcacttgcttttaaaaaagataaaccccacttgaaaaactgaggtgcttaaggagtaaaataatatgttcctggtggcatcctccagatcgtactgagaagcactccaca

SEQ ID NO: 125 - DNA, 174 bp, synthetic construct
  misc_feature 1..174: note = Description of Artificial Sequence: Synthetic polynucleotide
  source 1..174: mol_type = other DNA
atcgctacgcccacttggtggcctataaaggaagcgggcgaaccccggcagccctacacaacttggggcccctctcctctccagcccttctcctgtgtgcctgcctcctgccgccgccaccatgaccacctccatccgccagttcacctcctccagctccatcaagggctcctc

SEQ ID NO: 126 - DNA, 174 bp, synthetic construct
  misc_feature 1..174: note = Description of Artificial Sequence: Synthetic polynucleotide
  source 1..174: mol_type = other DNA
atctagagaaacatctgtagcatcaatgagtcagacaagcggtggtgaggcaggctcgcctcctccagctgttgttgctgctggatttgcctctgaagcagggagtgtctgcattaaaaatgacctgtagttctctgcttcatagatgcttcttcagctccctcctcttcctcc

SEQ ID NO: 127 - DNA, 174 bp, synthetic construct
  misc_feature 1..174: note = Description of Artificial Sequence: Synthetic polynucleotide
  source 1..174: mol_type = other DNA
atcttatccaggacgcttcattgcatttggtcttcatttctccttagtctcctccaggctgacatttcctcaatctttattggtcttccacagccctgacacttttggagataccagtcagcatttccaagttcgttctgtgagactgtagtgtcaggacaaagcaacaacaaa

SEQ ID NO: 128 - DNA, 174 bp, synthetic construct
  misc_feature 1..174: note = Description of Artificial Sequence: Synthetic polynucleotide
  source 1..174: mol_type = other DNA
atctttttataaaaaacccagtctttgctgaccagacaaagcataccagatctcaccagagagtcctaggggactacagaaggaaaaagacaagaggcagtaggatatctgtgtgtcctcccgctgaccacacttcctttagtgacccgattgcctcctcaagtcgcagacact

SEQ ID NO: 129 - DNA, 174 bp, synthetic construct
  misc_feature 1..174: note = Description of Artificial Sequence: Synthetic polynucleotide
  source 1..174: mol_type = other DNA
atgaaccacacaatggtcacagagtttgtcctcctgggcctttctgatgatcctgaccttcagattgtgatttttctctttttatttatcacgtatatattaagtgttactggaaacctgactatcatcaccctaacctttgtggactcccatctgcagacacctatgtatttc

SEQ ID NO: 130 - DNA, 174 bp, synthetic construct
  misc_feature 1..174: note = Description of Artificial Sequence: Synthetic polynucleotide
  source 1..174: mol_type = other DNA
atgacagagaaattccttttcctttatctttccctccttcccatgcccctactctcacaggcacagtggaatgaaaattcccttgtcagtttttccaaaataattgcttcgggaaaccatctaagcaactgttggatctgccacaacttcatcaccaggtcctcatcttaccaa

SEQ ID NO: 131 - DNA, 174 bp, synthetic construct
  misc_feature 1..174: note = Description of Artificial Sequence: Synthetic polynucleotide
  source 1..174: mol_type = other DNA
atgagaaattccacagcagtaacagactttattcttcttggattgacaagtgacccacagtggcaggttgtacttttcatatttcttcttgttacctacatgttaagtgtgactgggaacctgatcattatcaccctcaccctttcagatccccatctgcagactcccatgtat

SEQ ID NO: 132 - DNA, 174 bp, synthetic construct
  misc_feature 1..174: note = Description of Artificial Sequence: Synthetic polynucleotide
  source 1..174: mol_type = other DNA
atgccccaaattcttatattcacatacctgaatatgttttacttctttccccctttgcagatcttggcagaaaacctcaccatggtcaccgaattcctgttgctgggtttttccagccttggtgaaattcagctggccctctttgtagtttttctttttctgtatctagtcatt

SEQ ID NO: 133 - DNA, 174 bp, synthetic construct
  misc_feature 1..174: note = Description of Artificial Sequence: Synthetic polynucleotide
  source 1..174: mol_type = other DNA
atgccgatgcagctgctgcttacagattttattatcttttccatcagattcatcatcaacagcatggaagcgagaaaccaaacagctatttcaaaattccttctcctgggactgatagaggatccggaactgcagcccgtccttttcagcctgttcctgtccatgtacttggtc

SEQ ID NO: 134 - DNA, 174 bp, synthetic construct
  misc_feature 1..174: note = Description of Artificial Sequence: Synthetic polynucleotide
  source 1..174: mol_type = other DNA
atgcggcgaggtcctgctgcgtgagccattgacgtgtttggagctggagacggcctgggtgctggcgaagcggaggccggagtaagaagactgttagaatgccctcggtaacacagaggctgagagatcctgacataaatccttgtttgtcggaatctgatgcttccaccagat

SEQ ID NO: 135 - DNA, 174 bp, synthetic construct
  misc_feature 1..174: note = Description of Artificial Sequence: Synthetic polynucleotide
  source 1..174: mol_type = other DNA
atgcggctggccaaccagaccctgggtggtgactttttcctgttgggaatcttcagccagatctcacaccctggccgcctctgcttgcttatcttcagtatatttttgatggctgtgtcttggaatattacattgatacttctgatccacattgactcctctctgcatactccc

SEQ ID NO: 136 - DNA, 174 bp, synthetic construct
  misc_feature 1..174: note = Description of Artificial Sequence: Synthetic polynucleotide
  source 1..174: mol_type = other DNA
atgctcttgatttgaatcggaggctgctgtgaaaagggatgcagcttctgctagccactgtgaacttctgaatctcactagggttgggtctgctttggggcactcagataaccccagtatttccaaaccagctttcccttttgcttcaggacatatcttacccaagcctgcact

SEQ ID NO: 137 - DNA, 174 bp, synthetic construct
  misc_feature 1..174: note = Description of Artificial Sequence: Synthetic polynucleotide
  source 1..174: mol_type = other DNA
atgcttcttccatgattttttgaatctagactgggctgttctctgtgttaaaccaatcagttgcgaccttctcttaacagtgtgaagtgagggggtctctctccctccttctccttcctctgtgattcaccttcctttttaccctgccctgcggcggctccgccccttaccttc

SEQ ID NO: 138 - DNA, 174 bp, synthetic construct
  misc_feature 1..174: note = Description of Artificial Sequence: Synthetic polynucleotide
  source 1..174: mol_type = other DNA
atggaagaggaaaatgcaacattgctgacagagtttgttctcacaggatttttatatcaaccacagtggaaaatacccctgttcctggcattcttggtaatatatctcatcaccatcatggggaatcttggtctgattgctgtcatctggaaagaccctcaccttcatatccca

SEQ ID NO: 139 - DNA, 174 bp, synthetic construct
  misc_feature 1..174: note = Description of Artificial Sequence: Synthetic polynucleotide
  source 1..174: mol_type = other DNA
atggacaacccacaggctctgccactcttcctactcctggcctccttggtagggatcctcaccctcagagcctcttctggacttcagcaaaccaacttctcctctgccttctcttcagactcaaagagctcttcccaggggctgggtgtggaagttccctccatcaaacctccc

SEQ ID NO: 140 - DNA, 174 bp, synthetic construct
  misc_feature 1..174: note = Description of Artificial Sequence: Synthetic polynucleotide
  source 1..174: mol_type = other DNA
atggacacagggaactggagccaggtagcagaattcatcatcttgggcttcccccatctccagggtgtccagatttatctcttcctcttgttgcttctcatttacctcatgactgtgttgggaaacctgctgatattcctggtggtctgcctggactcccggcttcacacaccc

SEQ ID NO: 141 - DNA, 174 bp, synthetic construct
  misc_feature 1..174: note = Description of Artificial Sequence: Synthetic polynucleotide
  source 1..174: mol_type = other DNA
atggagccccaaaatacctccactgtgactaactttcagctgttaggattccagaaccttcttgaatggcaggccctgctctttgtcattttcctgctcatctactgcctgaccattatagggaatgttgtcatcatcaccgtggtgagccagggcctgcgactgcactcccct

SEQ ID NO: 142 - DNA, 174 bp, synthetic construct
  misc_feature 1..174: note = Description of Artificial Sequence: Synthetic polynucleotide
  source 1..174: mol_type = other DNA
atggcaacggtgaacacagatgccacagataaagacatatccaagttcaaggtcaccttcactttggtggtctccggaatagagtgcatcactggcatccttgggagtggcttcatcacggccatctatggggctgagtgggccaggggcaaaacactccccactggtgaccgc

SEQ ID NO: 143 - DNA, 174 bp, synthetic construct
  misc_feature 1..174: note = Description of Artificial Sequence: Synthetic polynucleotide
  source 1..174: mol_type = other DNA
atggcaagggagaattcgaccttcaactccgacttcatcctcctgggaatcttcaatcacagccccacccacaccttcctcttctttctggtcctggccatcttttcagtggccttcatgggaaactctgtcatggttctcctcatctacctggacacccagctccacaccccc

SEQ ID NO: 144 - DNA, 174 bp, synthetic construct
  misc_feature 1..174: note = Description of Artificial Sequence: Synthetic polynucleotide
  source 1..174: mol_type = other DNA
atggcatgggagaatcagaccttcaactctgacttcatcctcctgggaatcttcaatcacagccccacccacaccttcctcttctttctggtcctggccatcttttcagtggccttcatgggaaactctgtcatggttctcctcatctacctggacacccagctccacaccccc

SEQ ID NO: 145 - DNA, 174 bp, synthetic construct
  misc_feature 1..174: note = Description of Artificial Sequence: Synthetic polynucleotide
  source 1..174: mol_type = other DNA
atggctgaagaaaatcataccatgaaaaatgagtttatcctcacaggatttacagatcaccctgagctgaagactctgctgtttgtggtgttctttgccatctatctgatcaccgtggtggggaatattagtttggtggcactgatatttacacaccgtcggcttcacacacca

SEQ ID NO: 146 - DNA, 174 bp, synthetic construct
  misc_feature 1..174: note = Description of Artificial Sequence: Synthetic polynucleotide
  source 1..174: mol_type = other DNA
atggggcctttgttcaccaccattcctggtgcccattctggtcccatgcgtcctctgcccaagaaacacgtagaacccatggcagtgcgacagctgcttcttggcaactccaccatgatcaggcacacttgtcccatgtctgtcccgttgagccggcaagtcaaggaagttgct

SEQ ID NO: 147 - DNA, 174 bp, synthetic construct
  misc_feature 1..174: note = Description of Artificial Sequence: Synthetic polynucleotide
  source 1..174: mol_type = other DNA
atggtgactgaattcatttttctgggtctctctgattctcaggaactccagaccttcctatttatgttgttttttgtattctatggaggaatcgtgtttggaaaccttcttattgtcataacagtggtatctgactcccaccttcactctcccatgtacttcctgctagccaac

SEQ ID NO: 148 - DNA, 174 bp, synthetic construct
  misc_feature 1..174: note = Description of Artificial Sequence: Synthetic polynucleotide
  source 1..174: mol_type = other DNA
atggtgagggagaatcagaccttcaactccgacttcatcctccttggaatcttcaatcacagcccaccacacacgttcctcttctttctggtcctgggcatctttttagtggccttcatgggaaactctgtcatggttctcctcatctacctggacacccagctccacaccccc

SEQ ID NO: 149 - DNA, 174 bp, synthetic construct
  misc_feature 1..174: note = Description of Artificial Sequence: Synthetic polynucleotide
  source 1..174: mol_type = other DNA
atgtgcactgagggtgacacttctgagtgtgggggccctggctagggagtgggactggcaggcttgggtggggttcccaagctttaatcttcctaccccacagaatgttttctctgcccttcaggcagcctgagccgggcagggcccctgcctctgctacggcagcccccgatc

SEQ ID NO: 150 - DNA, 174 bp, synthetic construct
  misc_feature 1..174: note = Description of Artificial Sequence: Synthetic polynucleotide
  source 1..174: mol_type = other DNA
atgttctcaatgacaacagaagcactcaataattttgcacttggatgtaccaacttgttaatgactatgataccacaaattgatctgaagcaaattttcctttgtcctaattgcagactatacatgatccctgttggagctttcatcttttccttgggaaacatgcaaaaccaa

SEQ ID NO: 151 - DNA, 174 bp, synthetic construct
  misc_feature 1..174: note = Description of Artificial Sequence: Synthetic polynucleotide
  source 1..174: mol_type = other DNA
attcagccccgtgctcagcagacatcagggatcaccgactctgtgccaggagctgttcttgatgctgggaacgcaggggtggacaaaacagagaaagccctgccctcagtgagaaatatgctgtcatgtaaattgctttttcccctatagaatgccagcagttactctgcagag

SEQ ID NO: 152 - DNA, 174 bp, synthetic construct
  misc_feature 1..174: note = Description of Artificial Sequence: Synthetic polynucleotide
  source 1..174: mol_type = other DNA
attcttcccctctctacaaccctctctcctcagcgcttcttctttcttggtttgatcctgactgctgtcatggcgtgccctctggagaaggccctggatgtgatggtgtccaccttccacaagtactcgggcaaagagggtgacaagttcaagctcaacaagtcagaactaaag

SEQ ID NO: 153 - DNA, 174 bp, synthetic construct
  misc_feature 1..174: note = Description of Artificial Sequence: Synthetic polynucleotide
  source 1..174: mol_type = other DNA
attggctgagcccggctgtcagtcctttcgcgcctcggcggcgcggcatagcccggctcggcctgtaaagcagtctcaagcctgccgcagggagaagatggcggtcgccgtgagaactttgcaggaacagctggaaaaggccaaagagagtcttaagaacgtggatgagaacat

SEQ ID NO: 154 - DNA, 174 bp, synthetic construct
  misc_feature 1..174: note = Description of Artificial Sequence: Synthetic polynucleotide
  source 1..174: mol_type = other DNA
attgggctgagtcggagacttcctttcctgattggccgtgttgtacggcggcttctcgcgcagctgatgacctggaagtgatgcctaaagctgtggaccgcgtgggctcgcctccctgggactaggtttcagcggccgctgcgatgaccaaaataaaggcagatcccgacgggc

SEQ ID NO: 155 - DNA, 174 bp, synthetic construct
  misc_feature 1..174: note = Description of Artificial Sequence: Synthetic polynucleotide
  source 1..174: mol_type = other DNA
atttctttataaaccacaactctgggcccgcaatggcagtccactgccttgctgcagtcacagaatggaaatctgcagaggcctccgcagtcacctaatcactctcctcctcttcctgttccattcagagacgatctgccgaccctctgggagaaaatccagcaagatgcaagc

SEQ ID NO: 156 - DNA, 174 bp, synthetic construct
  misc_feature 1..174: note = Description of Artificial Sequence: Synthetic polynucleotide
  source 1..174: mol_type = other DNA
caaaaggcttccctctgtgtgttgcagtcctgtggcattatgcatgccccctcccagtgaccccaggctttttatggctgtgagacacgttaaaatttcaggggtaagacgtgaccttttgaggtgactataactgaagattgctttacagaagccaaaaaaggtttttgagtc

SEQ ID NO: 157 - DNA, 174 bp, synthetic construct
  misc_feature 1..174: note = Description of Artificial Sequence: Synthetic polynucleotide
  source 1..174: mol_type = other DNA
caacagaagccaagaaggaagccgtctatcttgtggcgatcatgtataagctggcctcctgctgtttgcttttcataggattcttaaatcctctcttatctcttcctctccttgactccagggaaatatcctttcaactctcagcacctcatgaagacgcgcgcttaactccgg

SEQ ID NO: 158 - DNA, 174 bp, synthetic construct
  misc_feature 1..174: note = Description of Artificial Sequence: Synthetic polynucleotide
  source 1..174: mol_type = other DNA
caactggaggcaaagagggttgctcaacgccccgcctcattggaaaaccaaatcagatctgggacctatatagcgtggcggaggcggggcgatgattgtcgcgctcgcacccactgcagctgcgcacagtcgcatttctttccccgcccctgagaccctgcagcaccatctgtc

SEQ ID NO: 159 - DNA, 174 bp, synthetic construct
  misc_feature 1..174: note = Description of Artificial Sequence: Synthetic polynucleotide
  source 1..174: mol_type = other DNA
caattgtgcatgtcggactcggcgcccagcgcccaagcgctaacccgctgaaagtttctcagcgaaatctcagggacgatctggaccccgctgagaggaactgcttttgagtgagatggtcccagaggcctggaggagcggactgcaagccccgcccaacacggactggcgttt

SEQ ID NO: 160 - DNA, 174 bp, synthetic construct
  misc_feature 1..174: note = Description of Artificial Sequence: Synthetic polynucleotide
  source 1..174: mol_type = other DNA
cacagccatcttgggatctgggcaagtgagcgagctccttcctcaccgggctgactagcctctcctttccctgtccccctccatcgctgctctgcaggaagccagcccccagggccagtcccggaggggctgatccgcatctacagcatgaggttctgcccctattctcacagg

SEQ ID NO: 161 - DNA, 174 bp, synthetic construct
  misc_feature 1..174: note = Description of Artificial Sequence: Synthetic polynucleotide
  source 1..174: mol_type = other DNA
cacatgcgcaccgcagcgggtcgcgcgccctaaggagtggcactttttaaaagtgcagccggagaccagcctacagccgcctgcatctgtatccagcgccaggtcccgccagtcccagctgcgcgcgccccccagtcccgcacccgttcggcccaggctaagttagccctcacc

SEQ ID NO: 162 - DNA, 174 bp, synthetic construct
  misc_feature 1..174: note = Description of Artificial Sequence: Synthetic polynucleotide
  source 1..174: mol_type = other DNA
caccattgaatcccagtcctaacagaagtactgcgaatcttgtggcctcattctgaacaaaagggattagagaagaaaaatctcttgatataaggcttgaaagcaagggcaggcaatcttggttgtgaatattttctgatttttccagaaatcaagcagaagattgagctgctg

SEQ ID NO: 163 - DNA, 174 bp, synthetic construct
  misc_feature 1..174: note = Description of Artificial Sequence: Synthetic polynucleotide
  source 1..174: mol_type = other DNA
caccctacagcagttcaggctgtgtggttcgcaggaagcatacactggctttttgattcttgctagttcccagctcacagtttgggaggatccaacaccaacctttacgtgaagtggaggcccaaggacagtgaggagctgggtggtcccagcctggagctgtgccagcctgac

SEQ ID NO: 164 - DNA, 174 bp, synthetic construct
  misc_feature 1..174: note = Description of Artificial Sequence: Synthetic polynucleotide
  source 1..174: mol_type = other DNA
caccctcgcgatctgtcaagtctgtccccaggggaggtccccctttcgggaggaagtttttaaggggatttctcaaaatcacccccgcgcttccttcactccttccttagagccggaggtcggtgagggcccgcggaatcatctatctcgcccccgtcgcagcgcgcagggacc

SEQ ID NO: 165 - DNA, 174 bp, synthetic construct
  misc_feature 1..174: note = Description of Artificial Sequence: Synthetic polynucleotide
  source 1..174: mol_type = other DNA
cacccttctcctcctccgcccagtactcgtggccagggtcgtatcagttctccgtcaacttgcttggggccttggacgagcctcctggcgcttcctgtcagtggcgaaaagctgctttgctccccctgtggatgtaaccccttagctggcattttgcatctcaattggcttgtg

SEQ ID NO: 166 - DNA, 174 bp, synthetic construct
  misc_feature 1..174: note = Description of Artificial Sequence: Synthetic polynucleotide
  source 1..174: mol_type = other DNA
caccgcaggctcctgtgccttgggcttgagctttgtggcagttaatggcttttctgcacgtatctctggtgtttacttgagaagcctggctgtgtccttgctgtaggagccggagtagctcagagtgatcttgtctgaggaaaggccagccccacttggggttaataaaccgcg

SEQ ID NO: 167 - DNA, 174 bp, synthetic construct
  misc_feature 1..174: note = Description of Artificial Sequence: Synthetic polynucleotide
  source 1..174: mol_type = other DNA
cacgtgtcagtgcctgaggcagagactgcgagaaaaaaacgcgcttcattccttcttccaccgccatactgtattttatactaaatctcatttttattccaacattttactcccgctcgatatagcccttggcgaggtgcctggctccatagattaaagcaaggagagccaatc

SEQ ID NO: 168 - DNA, 174 bp, synthetic construct
  misc_feature 1..174: note = Description of Artificial Sequence: Synthetic polynucleotide
  source 1..174: mol_type = other DNA
cacgttcttatgtaaccgagcccgggtaaagcagggctgcagaaagcagaaacggcgagcccggctcctgggagcaggtctcggcccccgcttggggccccggccgtgcggccggagggagcggccggatggagcggaggatgaaagccggatacttggaccagcaagtgccct

SEQ ID NO: 169 - DNA, 174 bp, synthetic construct
  misc_feature 1..174: note = Description of Artificial Sequence: Synthetic polynucleotide
  source 1..174: mol_type = other DNA
cactgacgggcacttgcaccgtgtggacagactctccggttctggggaaatccagtccctgttactccattttggccagaaattcaagacatttcaggtggcagaataaattcaatccttgtttctccatcttatcgagtagtagaagttagttacattctctttgaactcatc

SEQ ID NO: 170 - DNA, 174 bp, synthetic construct
  misc_feature 1..174: note = Description of Artificial Sequence: Synthetic polynucleotide
  source 1..174: mol_type = other DNA
cactgtctgaaacagtcgcgtaaggggtcgccactgggacactgtgaaccaggagtgagtcggagctgccgcgctgcccaggccatggactgtgaggtcaacaacggttccagcctcagggatgagtgcatcacaaacctactggtgtttggcttcctccaaagctgttctgac

SEQ ID NO: 171 - DNA, 174 bp, synthetic construct
  misc_feature 1..174: note = Description of Artificial Sequence: Synthetic polynucleotide
  source 1..174: mol_type = other DNA
cactgttggtaaagcccagcccttcccaacctgcaagctcaccttccaggactgggcccagcccatgctctccatatataagctgctgccccgagcctgattcctagtcctgcttctcttccctctctcctccagcctctcacactctcctcagctctctcatctcctggaacc

SEQ ID NO: 172 - DNA, 174 bp, synthetic construct
  misc_feature 1..174: note = Description of Artificial Sequence: Synthetic polynucleotide
  source 1..174: mol_type = other DNA
cagaggagcacgaggatcgtgggagctaagaatagcaggacccagtgctccataaaggataatagtttccagtacactatccctcatgatgactccttaagtggttcatcgtctgcatcttcgtgtgaaccagtgagtgattttccagcatctttccgaaaatctacctactgg

SEQ ID NO: 173 - DNA, 174 bp, synthetic construct
  misc_feature 1..174: note = Description of Artificial Sequence: Synthetic polynucleotide
  source 1..174: mol_type = other DNA
cagcatgttcgagctcattcctctccagcttctctgcagttgggagctgtttctcctgggacactgacccccactggagtagtctctggcccagcagctacacccacagctcagcatcttcgacagtcttcttttgagatacctgatgatgtacctctgccagcaggttgggag

SEQ ID NO: 174 - DNA, 174 bp, synthetic construct
  misc_feature 1..174: note = Description of Artificial Sequence: Synthetic polynucleotide
  source 1..174: mol_type = other DNA
cagccaatcacaagccgggctgtgctcctacaccatccgaagagcgaatcgtgcagagaccgtgtctacgattggcctctccctgacaaggatttaattttgaatttttctttatggcgtgggagaggccacagcccggactccatcgactcccccggctcttagactaaaatc

SEQ ID NO: 175 - DNA, 174 bp, synthetic construct
  misc_feature 1..174: note = Description of Artificial Sequence: Synthetic polynucleotide
  source 1..174: mol_type = other DNA
cagcccgcgtctctctgacagcagcaggggctgggtttaagcagcggctgctttgcctggggagcacccgtaaatggactttggtctcaatgctttgactctttgccgtggttttggatgttggaataccggcggtgatctgtcttttataaactcacctgatttaaaggaaag

SEQ ID NO: 176 - DNA, 174 bp, synthetic construct
  misc_feature 1..174: note = Description of Artificial Sequence: Synthetic polynucleotide
  source 1..174: mol_type = other DNA
cagccctgacgcttccttggggccacttccttctttttttcctagcaacggcgggtagcgtttttgacatcccgggaggctgtgccgccggcctgagcccagagtttcgcggcctccgcgatggcagaggtggaggaaaccttaaagaggatccagagtcataaaggggttatt

SEQ ID NO: 177 - DNA, 174 bp, synthetic construct
  misc_feature 1..174: note = Description of Artificial Sequence: Synthetic polynucleotide
  source 1..174: mol_type = other DNA
cagctcattctggatgaatgaatgattacactaagtgtcctccacattcctctgtgggctcacttcatggactcactttgcgtgcttgttaaatgtgctgtgttgctcccaagaccatgtaaagcctactgaccactaacctccctcacagcagaaactagacgtcaggttaaa

SEQ ID NO: 178 - DNA, 174 bp, synthetic construct
  misc_feature 1..174: note = Description of Artificial Sequence: Synthetic polynucleotide
  source 1..174: mol_type = other DNA
caggccactctcctgtgcctgccagaagagacagagcttgaggagagcttgaggagagcaggaaagcagcctcccccgttgcccctctggatccactgcttaaatacggacgaggacagggccctgtctcctcagcttcaggcaccaccactgacctgggacagtgaatcgaca

SEQ ID NO: 179 - DNA, 174 bp, synthetic construct
  misc_feature 1..174: note = Description of Artificial Sequence: Synthetic polynucleotide
  source 1..174: mol_type = other DNA
caggccggggttactgtggcgaccacgagagcagctttggcgctatggaggagcccggggttacccctcaaccgtatttggggctgctcctggaggagctacgcagggttgtggcagcactgcctgaaggttaggagtcggctttatgtgggacgagagaaaaagcttgctcta

SEQ ID NO: 180 - DNA, 174 bp, synthetic construct
  misc_feature 1..174: note = Description of Artificial Sequence: Synthetic polynucleotide
  source 1..174: mol_type = other DNA
caggcctccatctccaggtccctctccgaggcttcctcgctgccagctgagtcgtgggcacctgagggactacctaccactgctcccggctgtgccatcgccaccagctcccagcctcctgctcagacccgggacagcccctccatggcccccgagatggaccagttttacagg

SEQ ID NO: 181 - DNA, 174 bp, synthetic construct
  misc_feature 1..174: note = Description of Artificial Sequence: Synthetic polynucleotide
  source 1..174: mol_type = other DNA
caggtctgggctcttcagctgagcacttagtgtttgtacaggatgaggcagaagattcagggaatgatttcctctccagtgagagcacagacagtagcattccatggttcctccgggttcaggagttggcccatgacagtttgattgctgctactcgtgcacaactggcaaaga

SEQ ID NO: 182 - DNA, 174 bp, synthetic construct
  misc_feature 1..174: note = Description of Artificial Sequence: Synthetic polynucleotide
  source 1..174: mol_type = other DNA
cagtatgaggcaagcgcagggggacggggaccagcagctgtcgccgccgctctcaggctctgggaaccacccttctactttctgtctctaggaatttcactactctagggtgaagagggaacagaaatctttgccccctgactttggaaatctcgtttaaccttcaaactggcg

SEQ ID NO: 183 - DNA, 174 bp, synthetic construct
  misc_feature 1..174: note = Description of Artificial Sequence: Synthetic polynucleotide
  source 1..174: mol_type = other DNA
catatgggtgattggtacagtaggtttataaacagaagtttaaacttgtaagcttaagcttccgtttataaacagaagtttaaaattataggtcctgtttaacattcagctctgttaactcactcatctttttgtgtttttacactttgtcaagatttctttacatattcatca

SEQ ID NO: 184 - DNA, 174 bp, synthetic construct
  misc_feature 1..174: note = Description of Artificial Sequence: Synthetic polynucleotide
  source 1..174: mol_type = other DNA
catcgcgtcagtacttatggcgcctgccgggttgtggtgacgaaagcagttgccatggagttgctctgagtaaccctgaggcagtgggacgccaagactggagaggaagcgactgcggggagtatttccattttaaccggaaacaatccctgaacccacaggaatgaatgccta

SEQ ID NO: 185 - DNA, 174 bp, synthetic construct
  misc_feature 1..174: note = Description of Artificial Sequence: Synthetic polynucleotide
  source 1..174: mol_type = other DNA
catcggcgctttgccacttgtacccgagtttttgattctcaacatgtccgagactgctcctgccgctcccgctgccgcgcctcctgcggagaaggcccctgtaaagaagaaggcggccaaaaaggctgggggtacgcctcgtaaggcgtctggtcccccggtgtcagagctcat

SEQ ID NO: 186 - DNA, 174 bp, synthetic construct
  misc_feature 1..174: note = Description of Artificial Sequence: Synthetic polynucleotide
  source 1..174: mol_type = other DNA
catctccggccatactgccagccgcgttagccttgcctgaccgtcgcgctcggaaagaaacccccgcaactctaccacagaaaatcgagagccttggttacaaccgacttatcctgcaaattggtagaggaacggtggtacctgaacccttcagtactgagtcgtttactctgg

SEQ ID NO: 187 - DNA, 174 bp, synthetic construct
  misc_feature 1..174: note = Description of Artificial Sequence: Synthetic polynucleotide
  source 1..174: mol_type = other DNA
catttggggagaatgagggagaaaagaacgggcattccgagccaagagcactgcatgagcaaggagttgggaggttgcttacttgttgaacatatttgttgcgtatttgcatatttgctaaacaggttttcgtaacaccccagggcctgtaaggtttggtgtttccctttcaag

SEQ ID NO: 188 - DNA, 174 bp, synthetic construct
  misc_feature 1..174: note = Description of Artificial Sequence: Synthetic polynucleotide
  source 1..174: mol_type = other DNA
ccaaacaaacttgaagatctcacagacctaatagacacggcctttcctctctgcctctggctttatgtctctttcatcctcctctgcctttcccctgcccttgatcccttctgcaggtcttggctggtttcaggaaacgggtcccatcccatggactcccactctggggagcct

SEQ ID NO: 189 - DNA, 174 bp, synthetic construct
  misc_feature 1..174: note = Description of Artificial Sequence: Synthetic polynucleotide
  source 1..174: mol_type = other DNA
ccaagccagatcagcattgttctgaccctactaagtccaaaaccttttgaggccagaccttgtttcaactccaaagcctgctaggttccagcaccccccgcatccctcctcataccacccccttctcccccctatggaaaccgcttgcttatttttcaaacaggccaagtcatt

SEQ ID NO: 190 - DNA, 174 bp, synthetic construct
  misc_feature 1..174: note = Description of Artificial Sequence: Synthetic polynucleotide
  source 1..174: mol_type = other DNA
ccacctgtgccgccctgccttgttacctggaagcacagccttggggactgagcaggccctcactgtcactttaagaagggaatcagccactttgtgctcaccacctctggggaaggtgtgagaggagagaaggaagtggctgtttggctgctgacaacatgaagacttcctgcg

SEQ ID NO: 191 - DNA, 174 bp, synthetic construct
  misc_feature 1..174: note = Description of Artificial Sequence: Synthetic polynucleotide
  source 1..174: mol_type = other DNA
ccagggcgagtgacaggcgagccctatgctttacttccgagggcggtgtcagcaaagctagagtcagaggttccggttgagatcaagttgggagacacacccttgttcattctccttgagaagcagctattatcaacagaacattgacagaacctgtgtttggggaaaggactg

SEQ ID NO: 192 - DNA, 174 bp, synthetic construct
  misc_feature 1..174: note = Description of Artificial Sequence: Synthetic polynucleotide
  source 1..174: mol_type = other DNA
ccagggctggaatggggccgcccggctccccatggcagtgggtgacgctgctgctggggctgctgctccctcctgccgcccccttctggctcctcaatgtgctcttccccccgcacaccacgcccaaggctgagctcagtaaccacacacggcccgtcatcctcgtgcccggct

SEQ ID NO: 193 - DNA, 174 bp, synthetic construct
  misc_feature 1..174: note = Description of Artificial Sequence: Synthetic polynucleotide
  source 1..174: mol_type = other DNA
ccatgcactgagctggggacatgcaacaataacaggccatacaatgaaagtcgctgaagaagaatatgaattttgcctgcggatttgctaacactcgacaatcctaggaggtgagttccaacaaattggttcaaaaagaggggggataaacacgctggcccatgctgggcaagc

SEQ ID NO: 194 - DNA, 174 bp, synthetic construct
  misc_feature 1..174: note = Description of Artificial Sequence: Synthetic polynucleotide
  source 1..174: mol_type = other DNA
ccatgggttccccttcagcctgtccatacagagtgtgcattccctggcaggggctcctgctcacagcctcgcttttaaccttctggaacctgccaaacagtgcccagaccaatattgatgtcgtgccgttcaatgtcgcagaagggaaggaggtccttctagtagtccataatg

SEQ ID NO: 195 - DNA, 174 bp, synthetic construct
  misc_feature 1..174: note = Description of Artificial Sequence: Synthetic polynucleotide
  source 1..174: mol_type = other DNA
cccacatgcgctggatcagtccacggcttggggaaaggcatccagagaaggtgggagcggagagtttgaagtctttacaggcgggaagatggcggactggagctgaaagtgttgattgggaaacttgggtgattcttgtgtttatttacaatcctcttgacccaggcaggacac

SEQ ID NO: 196 - DNA, 174 bp, synthetic construct
  misc_feature 1..174: note = Description of Artificial Sequence: Synthetic polynucleotide
  source 1..174: mol_type = other DNA
cccagccctcgtcgccgccgccattttagctgttggttccggccgcaccgtgtgggctgtagtagcgggaggggtgggggtcctccagagttaagtggctgtcctcgactgtgcccatacagcagccagctttcttccttaataactgcccgttcgaagagtgcgaggatgtcc

SEQ ID NO: 197 - DNA, 174 bp, synthetic construct
  misc_feature 1..174: note = Description of Artificial Sequence: Synthetic polynucleotide
  source 1..174: mol_type = other DNA
cccccagccccctggtcccaccttgccttccgcccaccttcccacctgctgcagggagggccctcggctgagccttcagacacacttgcaccccatccgctcccctcctgaatttcttctgaccctcccttggcttcacagcacctgaaggccaggctgaggccccctgctctc

SEQ ID NO: 198 - DNA, 174 bp, synthetic construct
  misc_feature 1..174: note = Description of Artificial Sequence: Synthetic polynucleotide
  source 1..174: mol_type = other DNA
ccccggagtgcagtcaagttgaccaagaagcgggcactgtccatctcacctctgtcggatgccagcctggacctgcagacggttatccgcacctcacccagctccctcgtagctttcatcaactcgcgatgcacatctccaggaggctcctacggtcatctctccattggcacc

SEQ ID NO: 199 - DNA, 174 bp, synthetic construct
  misc_feature 1..174: note = Description of Artificial Sequence: Synthetic polynucleotide
  source 1..174: mol_type = other DNA
cccgccccaacccagcggttctgcgcatgcgcgggggccatattagcagcggttattcggtgagcggtggtggtttattcttccgtggagttaagggctccgtggacatctcaggtcttcagggtcttccatctggaactatataaagttcagaaaacatgtctcgaagatatg

SEQ ID NO: 200 - DNA, 174 bp, synthetic construct
  misc_feature 1..174: note = Description of Artificial Sequence: Synthetic polynucleotide
  source 1..174: mol_type = other DNA
ccctaccctatgctaaggggactcgtctccacctcgtaaaggaaactccccaagggaatccctgtcccctattttcctatccttctacccttccaagacagtcctagcctatagaactcctacctcccatcccctgaggtggtccccattcctccctcccttcctccccccgcc

SEQ ID NO: 201 - DNA, 174 bp, synthetic construct
  misc_feature 1..174: note = Description of Artificial Sequence: Synthetic polynucleotide
  source 1..174: mol_type = other DNA
ccctctttcagagtggtacatggaagacagcacaaagtggatccatactctgaaatgcagtaactctgatgcttgaatttgtctcccttcttgccagaaaggattctaataactcggtgtcaaagccaagacataaactcaaccccttctcttccaaaagcttcacgttacagc

SEQ ID NO: 202 - DNA, 174 bp, synthetic construct
  misc_feature 1..174: note = Description of Artificial Sequence: Synthetic polynucleotide
  source 1..174: mol_type = other DNA
ccgaggccgcctggcccttgtttactaaccctccctcaaacgtttcctgggtggctccccagggacggcagggctgggggcttctctccagggagctgctgctgaggcctgtgtctcccgtggctcctctgacaggtcccgcctgactccgctctggaaagtccttttgaagaa

SEQ ID NO: 203 - DNA, 174 bp, synthetic construct
  misc_feature 1..174: note = Description of Artificial Sequence: Synthetic polynucleotide
  source 1..174: mol_type = other DNA
ccgcctcctggcctcctggctgaggggaagctgagtgggccacggcccatgtgtcgcactcgcctcggctcccacacagccgcctctgctccagcaaggatgtggctcttccacactctgctctgcatagccagcctggccctgctggccgctttcaatgtggatgtggcccgg

SEQ ID NO: 204 - DNA, 174 bp, synthetic construct
  misc_feature 1..174: note = Description of Artificial Sequence: Synthetic polynucleotide
  source 1..174: mol_type = other DNA
ccgctccctggcgtgactcggcactgagagtcccgggagaagactcggcggtcgccacctcttctgtccaggcctcggccttcctgagcatctctccttcctctcccagatcgtcttctccttcagtttcaaagccagtggcgtcgcggccaccctgccgggctctctgtgagg

SEQ ID NO: 205 - DNA, 174 bp, synthetic construct
  misc_feature 1..174: note = Description of Artificial Sequence: Synthetic polynucleotide
  source 1..174: mol_type = other DNA
ccgctgctttggcggtgggcccagccgggagcagcctctttcgaaggccgccgtgacctcttcaagggcgtggagacgggaaggaaaaggccccggttggggttccagggcgccggtaacgttaaccggcgccttgcctgtcctctaaccgtcgctccctcctcccctagaaag

SEQ ID NO: 206 - DNA, 174 bp, synthetic construct
  misc_feature 1..174: note = Description of Artificial Sequence: Synthetic polynucleotide
  source 1..174: mol_type = other DNA
ccgctggtcttttactgccatcaatacactgttcttggtgcaaatacttcagcctctttattcaaagtatgttttatgtttttgccaaatatgatctctaattgaaagtttatttttggttttggatgaatctgcggagcttaagttgtgagaagaaagggggaacaagacaca

SEQ ID NO: 207 - DNA, 174 bp, synthetic construct
  misc_feature 1..174: note = Description of Artificial Sequence: Synthetic polynucleotide
  source 1..174: mol_type = other DNA
ccgggaacccctaccccatccccttattcagcacatgaaataaacaaggggcatccaaatcttgcggcaacgcccccgggacatgcatcgtcccctggactctctcaaaccccttatccctctggacagaatgcaggtccaaccacgctggtataccctcaaacccctcagaca

SEQ ID NO: 208 - DNA, 174 bp, synthetic construct
  misc_feature 1..174: note = Description of Artificial Sequence: Synthetic polynucleotide
  source 1..174: mol_type = other DNA
ccgggaggctgagactgcattgttgggatttgatgcactaatctcctgtctccgccgcctttccctctgttcggtctcttgccctccctcccttcgtctgtccttcctccgtgtgtttgtctatcctcctctgtccctcctctttcctctccttgctttctttggttttctgca

SEQ ID NO: 209 - DNA, 174 bp, synthetic construct
  misc_feature 1..174: note = Description of Artificial Sequence: Synthetic polynucleotide
  source 1..174: mol_type = other DNA
ccgtaaccgcctgttgccccctgtctcagagtccctcacgcgtcccctcccgtctttggctcgttggctgccgccgccggggcttcgccagccttcaagtcgagactactggccgaaggggcgtctgcggctctccgccgtccccagccctgcctctccctgggctctgcagcc

SEQ ID NO: 210 - DNA, 174 bp, synthetic construct
  misc_feature 1..174: note = Description of Artificial Sequence: Synthetic polynucleotide
  source 1..174: mol_type = other DNA
ccgtcggatgtgattattgttgctattgttaccgctccgcctggactgggtgcccggtcggaaagtcccgctccccgctcctcctcccaggcgcggaagcttcgcgccgcccgcctcgggggacacctcccgcgccatctcgggggcactggagataaggcctccctccctgac

SEQ ID NO: 211 - DNA, 174 bp, synthetic construct
  misc_feature 1..174: note = Description of Artificial Sequence: Synthetic polynucleotide
  source 1..174: mol_type = other DNA
ccgttcccctttcccctcccttccctatccccgacgaccggatcctgaggaggcagctgcggtggcagctgctgagttctcggtgaaggtatttcatttctcctgtcccctcccctccccaccccatctattaatattattcttttgaagattcttcgttgtcaagccgccaaa

SEQ ID NO: 212 - DNA, 174 bp, synthetic construct
  misc_feature 1..174: note = Description of Artificial Sequence: Synthetic polynucleotide
  source 1..174: mol_type = other DNA
cctcattccccatgaatgctgtgggaagtcctgaggggcaggagctgcaaaagctggggagtggagcctgggacaaccccgcctacagtggtcccccttccccacacgggacgctgagagtctgcaccatctccagcacggggcctctccagccccaacccaagaagcctgaag

SEQ ID NO: 213 - DNA, 174 bp, synthetic construct
  misc_feature 1..174: note = Description of Artificial Sequence: Synthetic polynucleotide
  source 1..174: mol_type = other DNA
cctcccccgccctcctggtccaatctccgatctgtttagtaagaaggcgcctgtgtctggcagagctggtgtgagacgagacaatcctgccccgccgccgggataatcaagagttttggccggacctttgagcatacaccgagagagtgaggagccagacgacaagcacacact

SEQ ID NO: 214 - DNA, 174 bp, synthetic construct
  misc_feature 1..174: note = Description of Artificial Sequence: Synthetic polynucleotide
  source 1..174: mol_type = other DNA
cctctccccccgggctccgcccaccccacgccgggaacccacgcgggccactacaagcccgccctttcctacgtctggtccagtcggtcttcctccggcccgggccctggcccagctagccggccatggaaggtaatggccccgctgctgtccactaccagccggccagccccc

SEQ ID NO: 215 - DNA, 174 bp, synthetic construct
  misc_feature 1..174: note = Description of Artificial Sequence: Synthetic polynucleotide
  source 1..174: mol_type = other DNA
cctctctccctcctccctcgctctctcccccttctctccccttcttcctcggtttcttccgtcctctctctccccctcctcctcccccgcctcctcctcctgcgctcccgccccctgccccctccccccgtgcctgcagacgcgcggatcgtccatgcgctcctcgcgggcaga

SEQ ID NO: 216 - DNA, 174 bp, synthetic construct
  misc_feature 1..174: note = Description of Artificial Sequence: Synthetic polynucleotide
  source 1..174: mol_type = other DNA
cctctctgctgagtcagagctctgcatatattttaagaaaaggcattgaggaactcaatcaaaccagtattcttttcacacaggtttcatcagtttcacccttttctgtgtgcggctgattttagaaagattgcttccttgtatggtagcgataagtttgatttgccctatggg

SEQ ID NO: 217 - DNA, 174 bp, synthetic construct
  misc_feature 1..174: note = Description of Artificial Sequence: Synthetic polynucleotide
  source 1..174: mol_type = other DNA
cctctcttccagggctgccgtccacactctcccggtcagagtcctgggaccacatggggacgctgccatggcttcttgccttcttcattctgggtctccaggcttgggatactcccaccatcgtctcccgcaaggagtggggggcaagaccgctcgcctgcagggccctgctga

SEQ ID NO: 218 - DNA, 174 bp, synthetic construct
  misc_feature 1..174: note = Description of Artificial Sequence: Synthetic polynucleotide
  source 1..174: mol_type = other DNA
cctctggactttgaggaagaacccacagcaggaggaagtcagcagggagtggctgtgtgaaacctgggaccacttctgccttcctacgtggcagtggctcagagttatttgagtgctgtcaaactgagctgattgctgccctagtattagatcagtccatagaaagtgggagca

SEQ ID NO: 219 - DNA, 174 bp, synthetic construct
  misc_feature 1..174: note = Description of Artificial Sequence: Synthetic polynucleotide
  source 1..174: mol_type = other DNA
cctgaagatgtagctcctactgttggattttcaaaaattaaccttagacaaggaaagtttgaagtcaccatctttgacttgggaggtggaataagaattcggggaatctggaagaattactatgctgaatcctatggggtaatatttgttgtggattccagtgatgaagagaga

SEQ ID NO: 220 - DNA, 174 bp, synthetic construct
  misc_feature 1..174: note = Description of Artificial Sequence: Synthetic polynucleotide
  source 1..174: mol_type = other DNA
cctgcttttggttcttacagtagtcggcgtaggccttaggtgggttcgtgcgccttctacctcgctgtttcggttttcctggctcctcggcccttttctcccctgttgcagctgggagcggacgaagcgcgaagctgggattttttactgtctcctgaagaatttaacacaaac

SEQ ID NO: 221 - DNA, 174 bp, synthetic construct
  misc_feature 1..174: note = Description of Artificial Sequence: Synthetic polynucleotide
  source 1..174: mol_type = other DNA
cctggatgtagctgagaggctgggagaagagacgaccgctggagaccgagcggcgtggggaagacctaggggggtgggtgggggaagcagacaggagaacactcgaaatcaagcgctttacagattattttattttgtatagagaacacgtagcgactccgaagatcagcccca

SEQ ID NO: 222 - DNA, 174 bp, synthetic construct
  misc_feature 1..174: note = Description of Artificial Sequence: Synthetic polynucleotide
  source 1..174: mol_type = other DNA
cctgtcaaagccttcttaattatgtctgagaaaagtactaaaataggtgccattttaaattcccagacaaggaaaaaccaaggattagaaattaagtagcttgcccaaggccacacatcagatcctgattgagtcaatgctttgcattctcagtcctctgcataaagctgagag

SEQ ID NO: 223 - DNA, 174 bp, synthetic construct
  misc_feature 1..174: note = Description of Artificial Sequence: Synthetic polynucleotide
  source 1..174: mol_type = other DNA
ccttcattccacagacacacacagcctctctgcccacctctgcttcctctaggaacacaggagttccagatcacatcgagttcaccatgaattcactcagtgaagccaacaccaagttcatgttcgatctgttccaacagttcagaaaatcaaaagagaacaacatcttctatt

SEQ ID NO: 224 - DNA, 174 bp, synthetic construct
  misc_feature 1..174: note = Description of Artificial Sequence: Synthetic polynucleotide
  source 1..174: mol_type = other DNA
ccttcatttggggtttcggttcccccccttccccttccccggggtctgggggtgacattgcaccgcgcccctcgtggggtcgcgttgccaccccacgcggactccccagctcgcgcgcccctcccatttgcctgtcctggtcaggcccccaccccccttcccacctgaccagcc

SEQ ID NO: 225 - DNA, 174 bp, synthetic construct
  misc_feature 1..174: note = Description of Artificial Sequence: Synthetic polynucleotide
  source 1..174: mol_type = other DNA
cgacttcggtctgcgccggaagtgcatgagctgccgatgtggtgcttagtgattgcggtttcggtcgctctcccgtgtttcccgggctgggtatttgcctcgcaccatggcgcccaagggcaaagtgggcacgagagggaagaagcagatatttgaagagaacagagagactct

SEQ ID NO: 226 - DNA, 174 bp, synthetic construct
  misc_feature 1..174: note = Description of Artificial Sequence: Synthetic polynucleotide
  source 1..174: mol_type = other DNA
cgagggctcctgctggtactgtgttcgctgctgcacagcaaggccctgccacccaccttcaggccatgcagccatgttccgggagccctaattgcacagaagcccatggggagctccagactggcagccctgctcctgcctctcctcctcatagtcatcgacctctctgactct

SEQ ID NO: 227 - DNA, 174 bp, synthetic construct
  misc_feature 1..174: note = Description of Artificial Sequence: Synthetic polynucleotide
  source 1..174: mol_type = other DNA
cgcaccgggtccgcggggaaccccctatctctaccttccccgacgcggctcccacaagacccccatctctgcgccgggcccctccacgtgcggggtctcaggtttgaggtggtcccctccaagtttaaagagaagctggacaaagcctccttcgctactccgtatgggtacgcc

SEQ ID NO: 228 - DNA, 174 bp, synthetic construct
  misc_feature 1..174: note = Description of Artificial Sequence: Synthetic polynucleotide
  source 1..174: mol_type = other DNA
cgcactcccgttccagccaggctgagccttctgtcccctgcctctggggcctgggaaccccccttcttctttctcctgaatggcacccccgccctagaatccagacaccgagtttcccactgtggctggttcaagggtatgtgagagctccctggtgacagtctgtggctgagc

SEQ ID NO: 229 - DNA, 174 bp, synthetic construct
  misc_feature 1..174: note = Description of Artificial Sequence: Synthetic polynucleotide
  source 1..174: mol_type = other DNA
cgccacgcactcctctttctgcctggccggccactcccgtctgctgtgacgcgcggacagagagctaccggtggacccacggtgcctccctccctgggatctacacagaccatggccttgccaacggctcgacccctgttggggtcctgtgggacccccgccctcggcagcctc

SEQ ID NO: 230 - DNA, 174 bp, synthetic construct
  misc_feature 1..174: note = Description of Artificial Sequence: Synthetic polynucleotide
  source 1..174: mol_type = other DNA
cgcccgcccagccccgggggcagggagagcctagattacggaagtaccgcgagcaaggagcgcggaatcggggagcgtccggagctagctggatcctctaggcaggatggtgatgggaatctttgcaaattgtatcttctgtttgaaagtgaagtacttacctcagcagcagaa

SEQ ID NO: 231 - DNA, 174 bp, synthetic construct
  misc_feature 1..174: note = Description of Artificial Sequence: Synthetic polynucleotide
  source 1..174: mol_type = other DNA
cgcccggcgagcccgcgaggtcactatcatatgacaaaggctttgccgcagttcatcttcctccctgtgtactttccatttgccttcctggaatcctgctgcatcacagaagctggaagttctgatgttccactgaaatcacaatggaaagtcttgacttgactggtcacagta

SEQ ID NO: 232 - DNA, 174 bp, synthetic construct
  misc_feature 1..174: note = Description of Artificial Sequence: Synthetic polynucleotide
  source 1..174: mol_type = other DNA
cgcccgggccactgctctccaggaagataaggcttttaaagcagcctagcactagaaggctctgtgtgctccgggatggagcaggtgtgcagagggtgagaacccagctctgggaccaagtcacttgcttccttacttagcaagactatcgacttgagcaaacttggacctggg

SEQ ID NO: 233 - DNA, 174 bp, synthetic construct
  misc_feature 1..174: note = Description of Artificial Sequence: Synthetic polynucleotide
  source 1..174: mol_type = other DNA
cgccggcctgcagtctagccgtagtgcgcctgcgcgcggctaggaggggccgtcaggcggggatacagcctggaaggtaatgcatgtccatggtacacaaattcacaagtttggagaccctgacacacccaccttctcacctgggctctgcgtatcccccagccttgagggaag

SEQ ID NO: 234 - DNA, 174 bp, synthetic construct
  misc_feature 1..174: note = Description of Artificial Sequence: Synthetic polynucleotide
  source 1..174: mol_type = other DNA
cgcctcggcctttgagccccgcccccgccgtgcaaaaacaaccagaggctgctctgcttgagggtgaagccgcctcccagttttccctccccctctacccccacccccatagttctctccaccaggtccagtgacaattggatgatgcagccttgataatcatccgattccaga

SEQ ID NO: 235 - DNA, 174 bp, synthetic construct
  misc_feature 1..174: note = Description of Artificial Sequence: Synthetic polynucleotide
  source 1..174: mol_type = other DNA
cgcgacttttgctttacccttctgctgtgctactgctgtcgcgagacttcctgctcatctgccgctccctttgccgccgccttagcccgggacccgaacccagcctctcccctacccgaacaccggccccggctccaccgaggcccgggtcccccagcccgtctcgccgccgcc

SEQ ID NO: 236 - DNA, 174 bp, synthetic construct
  misc_feature 1..174: note = Description of Artificial Sequence: Synthetic polynucleotide
  source 1..174: mol_type = other DNA
cgcggccgccaaggcgtccttctcctcgaggctgggcagccttgtccgcggcatcacagccctcacctccaagcacgaagaagaaaaattaatccagcaggaactgagtagtctgaaagcgactgtttctgctcctactacaacactgctactggatattttgcttttcagaaa

SEQ ID NO: 237 - DNA, 174 bp, synthetic construct
  misc_feature 1..174: note = Description of Artificial Sequence: Synthetic polynucleotide
  source 1..174: mol_type = other DNA
cgcgggggccgtaggaagccaaccttccctgcttctccggggccctcgccccctcctccccacaaaatcagggatggaggcgcctccccggcaccctcttagcagccctccccaggaaaagtgtcccccctgagctcctaacgctccccaacagctacccctgccccccacgcc

SEQ ID NO: 238 - DNA, 174 bp, synthetic construct
  misc_feature 1..174: note = Description of Artificial Sequence: Synthetic polynucleotide
  source 1..174: mol_type = other DNA
cgcgtcgggctgcaggagaagatggcggtctccacaggagttaaagttcctcgtaattttcgcttgttggaagaacttgaagaaggacaaaaaggagtaggcgacggtacagttagctggggccttgaagatgatgaagatatgacacttacaaggtggacaggcatgattatt

SEQ ID NO: 239 - DNA, 174 bp, synthetic construct
  misc_feature 1..174: note = Description of Artificial Sequence: Synthetic polynucleotide
  source 1..174: mol_type = other DNA
cgctctcctttcgttgcctgatcgccgccatcatgggtcgcatgcatgctcccgggaagggcctgtcccagtcggctttaccctatcgacgcagcgtccccacttggttgaagttgacatctgacgacgtgaaggagcagatttacaaactggccaagaagggccttactcctt

SEQ ID NO: 240 - DNA, 174 bp, synthetic construct
  misc_feature 1..174: note = Description of Artificial Sequence: Synthetic polynucleotide
  source 1..174: mol_type = other DNA
cggaaacatggcggcgggaagagagtgagccgccccgcgcccccgccgcgccctcagatggagaaattagcatacaaagaaactgacttgtcagaagtcagagcaaggtattggtggatccagggataaatcccaaacttcttaacccctagaccggtttttagtccattgact

SEQ ID NO: 241 - DNA, 174 bp, synthetic construct
  misc_feature 1..174: note = Description of Artificial Sequence: Synthetic polynucleotide
  source 1..174: mol_type = other DNA
cggaacttggatcacatcagatcctctcgagcccagggtgacaagattattgatggcgccccatgtgcaagaggctcccacccatggcaggtggccctgctcagtggcaatcagctccactgcggaggcgtcctggtcaatgagcgctgggtgctcactgccgcccactgcaag

SEQ ID NO: 242 - DNA, 174 bp, synthetic construct
  misc_feature 1..174: note = Description of Artificial Sequence: Synthetic polynucleotide
  source 1..174: mol_type = other DNA
cggactgggaggcagggctctggctcacgcttgtaatcccaacattttgggaggacgaagccagcctcatcgcttaagcacaggagttcgaggactgggaggtggaggttgtggtgcctgtatcacctgcccttctgctgacactcctgcctgctgttcctgactacagccatc

SEQ ID NO: 243 - DNA, 174 bp, synthetic construct
  misc_feature 1..174: note = Description of Artificial Sequence: Synthetic polynucleotide
  source 1..174: mol_type = other DNA
cggagggactttctgttagcagcatgagggcctgtggttagacctatagaggtatttcctttgatttaagccagaaagtcctgagagcggatcggggagcatttgcggatcggtcactttttcctcctttctgagtctcttatcccctaccacagggacggcccaggtggcagg

SEQ ID NO: 244 - DNA, 174 bp, synthetic construct
  misc_feature 1..174: note = Description of Artificial Sequence: Synthetic polynucleotide
  source 1..174: mol_type = other DNA
cggcgccggaggaggaagtggtgaggttgttgctccttcagcgcctatcgctggctcttggggcgcagagaggggccgcagtctccgcggctgcgtcgagctcccttgcagtcccctccatgttccccggcgccactactccccttcctaaggccgccgcttaccccggggtct

SEQ ID NO: 245 - DNA, 174 bp, synthetic construct
  misc_feature 1..174: note = Description of Artificial Sequence: Synthetic polynucleotide
  source 1..174: mol_type = other DNA
cggcgcctataaagtcgccctccgcccggacgtaaacaaacctcgcctggctcccagctggtgctgaagctcgtcagttcaccatccgccctcggcttccgcggggcgctgggccgccagcctcggcaccgtcctttcctttctccctcgcgttaggcaggtgacagcagggac

SEQ ID NO: 246 - DNA, 174 bp, synthetic construct
  misc_feature 1..174: note = Description of Artificial Sequence: Synthetic polynucleotide
  source 1..174: mol_type = other DNA
cggcttctgctgctagcgccggagctgagttagttctgagaaggtttccctgggcgttccttgtccggcggcctctgctgccgcctccggagacgcttcccgatagatggctacaggccgcggaggaggaggaggtggagttgctgcccttccggagtccgccccgtgaggaga

SEQ ID NO: 247 - DNA, 174 bp, synthetic construct
  misc_feature 1..174: note = Description of Artificial Sequence: Synthetic polynucleotide
  source 1..174: mol_type = other DNA
cgggcgcacaactgttgctctagaaacttctcctcctgctcccacgggggttacttgcactacccaggctcctcctgtggctcttcctaccccagcaacctggtctacagcactgacctctgctctcccagcacctgccagctgggttcctctctctataggggctgtcaggag

SEQ ID NO: 248 - DNA, 174 bp, synthetic construct
  misc_feature 1..174: note = Description of Artificial Sequence: Synthetic polynucleotide
  source 1..174: mol_type = other DNA
cggggcgccgagacagggcgtgttcgctgttcagtgccggtgttgcagggagtgagggcagctggagtgcgttctgccgaagcttgtggttgcacgcccatcgtcttaggggctaccttccgtgttaccttatcccatatcacacaactggtcctcagccataacaagctaaca

SEQ ID NO: 249 - DNA, 174 bp, synthetic construct
  misc_feature 1..174: note = Description of Artificial Sequence: Synthetic polynucleotide
  source 1..174: mol_type = other DNA
cggggcgccgctgagccaagtgggccacccgggcacggccacgctcccgggtcacgtgacacggagggggccgaattctgctggaggcagcgccatatcctggaggtgaaggtaccacctcatggagacccccgcggccgccgcccccgctgggagcttattcccctccttcct

SEQ ID NO: 250 - DNA, 174 bp, synthetic construct
  misc_feature 1..174: note = Description of Artificial Sequence: Synthetic polynucleotide
  source 1..174: mol_type = other DNA
cggggtctccgggaagtcgcggcgccttcggatgtggcggatgcggccgtgagccggcgggggaggtgctgctgctgcctccactgtactcagacccaggtagcacaggattgtccatcctccagcagctcagtgcaacggtgtgaactcagcctgtttcagagcctccacacc

SEQ ID NO: 251 - DNA, 174 bp, synthetic construct
  misc_feature 1..174: note = Description of Artificial Sequence: Synthetic polynucleotide
  source 1..174: mol_type = other DNA
cgtccctccctggaccccggcgacttcctctctcggtttgtctgggtcatcttgtctgcccgccgctggcctggccccgtctgtctctctcagcagctgtctttctcgcgcccactggccggtctctcctcttccccgcagttgcctccttctctgcctgcctgggtggccgcc

SEQ ID NO: 252 - DNA, 174 bp, synthetic construct
  misc_feature 1..174: note = Description of Artificial Sequence: Synthetic polynucleotide
  source 1..174: mol_type = other DNA
cgtctaaattcgcgtcggttcttatttctctccctggcaaggtctgaagacggatggagtctagttctgtcgcccaggctggagcccagtggtgtgatctcagctcactgcaatctccacctcctggcttcaagcgattcttctgcttcagcctcccgactgtgtcagcgtgtt

SEQ ID NO: 253 - DNA, 174 bp, synthetic construct
  misc_feature 1..174: note = Description of Artificial Sequence: Synthetic polynucleotide
  source 1..174: mol_type = other DNA
cgtctgggcagattattcctatgcatcctgccttcctcacccaggactggtctgagagggattcatgatggaagcatgttcattctgtgacctggttctcgcctaaatgtggtcaacagtgtcagcagttcagaggacatcaagcccttaccagggcttcccgggattggaaac

SEQ ID NO: 254 - DNA, 174 bp, synthetic construct
  misc_feature 1..174: note = Description of Artificial Sequence: Synthetic polynucleotide
  source 1..174: mol_type = other DNA
cgttgcggccgctccctgccttagaggccagccttggacacttgctgcccctttccagcccggattctgggatccttccctctgagccaacatctgggtcctgccttcgacaccaccccaaggcttcctaccttgcgtgcctggagtctgccccaggggcccttgtcctgggcc

SEQ ID NO: 255 - DNA, 174 bp, synthetic construct
  misc_feature 1..174: note = Description of Artificial Sequence: Synthetic polynucleotide
  source 1..174: mol_type = other DNA
ctaaactgagccttgaagaatggttaagagtttgctccaggaatatattgcaaaggcattcttggcggaaggacccgagacgtgaaaaaaacaggcgtattctggtaatttcgaggagaggtcgacagtgtggggagttggagtgacccggctggatgtgacccccaggacaga

SEQ ID NO: 256 - DNA, 174 bp, synthetic construct
  misc_feature 1..174: note = Description of Artificial Sequence: Synthetic polynucleotide
  source 1..174: mol_type = other DNA
ctacacatctcattatagtttagggagtctcgctctatcccctaggctggagtgcattggcgccatctcggctcatttgcaacctctgtctcccgggttcaagcgattctcctgcctcagcttcccgaggagctgggattacaggtcctgagggagtctaacaagttagcagaa

SEQ ID NO: 257 - DNA, 174 bp, synthetic construct
  misc_feature 1..174: note = Description of Artificial Sequence: Synthetic polynucleotide
  source 1..174: mol_type = other DNA
ctacctgaaaaccctggccgggtgctggggcttgaggagcagttcccacttcccagtctttttcacttttcacagctgcaaagttcagggagttgaactgcagtgctttcagttcactgctcactctgccacgatcaatctctgttgtaaattttcctcccagagcacgtgacg

SEQ ID NO: 258 - DNA, 174 bp, synthetic construct
  misc_feature 1..174: note = Description of Artificial Sequence: Synthetic polynucleotide
  source 1..174: mol_type = other DNA
ctactgtgtacttacaaaccacactcatattcgtcacgtcatttcatcttcacccccacctccaaatgaggcttgaaatgagatgagatgttcctccctcccctttcaaccatggacctcacactgtggacttcctcttagagcctctgagttaggtacccaagccaaggcaca

SEQ ID NO: 259 - DNA, 174 bp, synthetic construct
  misc_feature 1..174: note = Description of Artificial Sequence: Synthetic polynucleotide
  source 1..174: mol_type = other DNA
ctaggggtcgggctcggccgtcgtcgttgtttgtcgccgcatccccgcttccgggttaggccgttcctgcccgccccctcctctcctcccttcggacccatagatctcaggctcggctccccgcccgccgcagcccactgttgacccggcccgtactgcggccccgtggccacc

SEQ ID NO: 260 - DNA, 174 bp, synthetic construct
  misc_feature 1..174: note = Description of Artificial Sequence: Synthetic polynucleotide
  source 1..174: mol_type = other DNA
ctatcaaggaagaaattgccaaaccatgtctttttttctgttttcagagtagttcacaacagatctgagtgttttaattaagcatggaatacagaaaacaacaaaaaacttaagctttaatttcatctggaattccacagaaccttcggctcgcgtgcttctgagctgctgtgg

SEQ ID NO: 261 - DNA, 174 bp, synthetic construct
  misc_feature 1..174: note = Description of Artificial Sequence: Synthetic polynucleotide
  source 1..174: mol_type = other DNA
ctcactgcaagctctgcctcccggttgctgaacctgtttgcatgagttgctcctgacggccctttaggatacttccatgtctgtagggtctagagtgacatctcctcccctcccctgacgagatctgccctccttggcactgtgcttccccagaggggtggcctcgctgttccc

SEQ ID NO: 262 - DNA, 174 bp, synthetic construct
  misc_feature 1..174: note = Description of Artificial Sequence: Synthetic polynucleotide
  source 1..174: mol_type = other DNA
ctcagcagtatttgcggaggttttcacaggaggccgttgcttcgtaaatattatacatgtattcttctttttggagcattttgattattactctcagacgtgcgtggcaacaagtgactgagacctagaaatccaagcgttggaggtcctgaggccagcctaagtcgcttcaaa

SEQ ID NO: 263 - DNA, 174 bp, synthetic construct
  misc_feature 1..174: note = Description of Artificial Sequence: Synthetic polynucleotide
  source 1..174: mol_type = other DNA
ctcagttaatgcaattttgaagcatgccctgaatagattcagtcattatcaagtcaaactaaaaacggtgaaaggttgcgactattaccaaataggaaaaatctgaagacataagaactacacatgaggaatatgtcatttagcactttcactttttgatctccacagaagaca

SEQ ID NO: 264 - DNA, 174 bp, synthetic construct
  misc_feature 1..174: note = Description of Artificial Sequence: Synthetic polynucleotide
  source 1..174: mol_type = other DNA
ctccccactctcaggctggtggggtggggaaagcagcccattcctgggctcagagactcccaccccagctcagagggagcaggggcccagccagggacggaccctcattcctcccagggaccccagacctctgtctctctcggcaggccttggctccttgaacttttggccgcc

SEQ ID NO: 265 - DNA, 174 bp, synthetic construct
  misc_feature 1..174: note = Description of Artificial Sequence: Synthetic polynucleotide
  source 1..174: mol_type = other DNA
ctcccgcggtcctgctcggcggagtggggcattcttcgggggtgcatcagagggagggcagagcctgaggatctaagcgaaggcttccccgggtgtaatttcctgggctgtttgtgaggagagatcgaattcgcctcctgctctcaggcctctctgctcctgtcttttgtttgg

SEQ ID NO: 266 - DNA, 174 bp, synthetic construct
  misc_feature 1..174: note = Description of Artificial Sequence: Synthetic polynucleotide
  source 1..174: mol_type = other DNA
ctccgctccaatcccggaagtgcgcgcggccccgcccccgccggttcgcgtctctctgctgcggcgcggggaccgctgtgctctcggaaacggggtctctgggggatccagtgacgtgcccaaccacagagaccagacccctcctcctgtagagagtggtgctgccctctcggg

SEQ ID NO: 267 - DNA, 174 bp, synthetic construct
  misc_feature 1..174: note = Description of Artificial Sequence: Synthetic polynucleotide
  source 1..174: mol_type = other DNA
ctcctgggcccctcctcccttcaaggattgcgaagaactggtcgcaaatcctcctaagccaccagcatctcggtcttcagctcacaccagccttgagcccagcctgcggccaggggaccacgcacgtcccacccacccagcgactccccagccgctgcccactcttcctcactc

SEQ ID NO: 268 - DNA, 174 bp, synthetic construct
  misc_feature 1..174: note = Description of Artificial Sequence: Synthetic polynucleotide
  source 1..174: mol_type = other DNA
ctcgaggtgggcggggagaagggggacgggcgcggacccgggtcccagggccaggcctcccttgtgagtagactatgcaaagaaaaagtgggccaccatatctggaaactacagtctatgctttgaagcgcaaaagggaataaacatttaaagactcccccggggacctggagg

SEQ ID NO: 269 - DNA, 174 bp, synthetic construct
  misc_feature 1..174: note = Description of Artificial Sequence: Synthetic polynucleotide
  source 1..174: mol_type = other DNA
ctctgaaggcatggcgcgtacgaagcagactgctcgcaagtccaccggcggcaaggctccgcgcaagcagctggccaccaaggcggctcggaagagcgctccggccaccggcggtgtcaagaagccccatcgctatcggcctggtacagtggctctccgcgagattcgccgcta

SEQ ID NO: 270 - DNA, 174 bp, synthetic construct
  misc_feature 1..174: note = Description of Artificial Sequence: Synthetic polynucleotide
  source 1..174: mol_type = other DNA
ctctgtggttcgggtccgctttcgtctccgtcctgctgccgttaccgccgctgctgccgccgcttgcgtcccccgctccggtctgtggtgcagccgggacccaggaccatgtctctgtctcgctcagaggagatgcaccggctcacggaaaatgtctataagaccatcatggag

SEQ ID NO: 271 - DNA, 174 bp, synthetic construct
  misc_feature 1..174: note = Description of Artificial Sequence: Synthetic polynucleotide
  source 1..174: mol_type = other DNA
ctctttccgtctcaggtcgccgctgcgaagggagccgccgccatgtctgcgcatctgcaatggatggtcgtgcggaactgctccagtttcctgatcaagaggaataagcagacctacagcactgagcccaataacttgaaggcccgcaattccttccgctacaacggactgatt

SEQ ID NO: 272 - DNA, 174 bp, synthetic construct
  misc_feature 1..174: note = Description of Artificial Sequence: Synthetic polynucleotide
  source 1..174: mol_type = other DNA
ctgaattctccattctgggctcttgcctgtgaaatctttctttgctttccccatcttttcctcgcattttttcaccatctttccctcaatctccaggagccaatgcgagactttggctccgattaagcgacggcccgagactcggggtgcgcgaggaggatcgacagagtggtg

SEQ ID NO: 273 - DNA, 174 bp, synthetic construct
  misc_feature 1..174: note = Description of Artificial Sequence: Synthetic polynucleotide
  source 1..174: mol_type = other DNA
ctgatgtcttcatcattctcaaattcttaggacggtcgggccctggaaggaacgctctcggaattggccgcggaaaccgatctgcccgttgtgtttgtgaaacagagaaagataggcggccatggtccaaccttgaaggcttatcaggagggcagacttcaaaagctactaaaa

SEQ ID NO: 274 - DNA, 174 bp, synthetic construct
  misc_feature 1..174: note = Description of Artificial Sequence: Synthetic polynucleotide
  source 1..174: mol_type = other DNA
ctgatgtgagctagtttgtctggttgagttggatgtttaaatagaaggcagaacaacaacaggtactccacatcagcattctcaagactggagaagttaggcctcagacatcccaagccttctcctttcattggaaacttgacatttttccgccagggtttttgggaaagccaa

SEQ ID NO: 275 - DNA, 174 bp, synthetic construct
  misc_feature 1..174: note = Description of Artificial Sequence: Synthetic polynucleotide
  source 1..174: mol_type = other DNA
ctgcagacgaggcaggcggaagaggcgggacttcgcgggtgacgtcatcggggcgccggaggcccggggcgcctgggaatttgaagcaaacaggcagcgcgcgacaatggcggtcgctcgtgcagctttggggccattggtgacgggtctgtacgacgtgcaggctttcaagtt

SEQ ID NO: 276 - DNA, 174 bp, synthetic construct
  misc_feature 1..174: note = Description of Artificial Sequence: Synthetic polynucleotide
  source 1..174: mol_type = other DNA
ctgcagaggagaccggagggcagaaggcagagtccaggcttagactgcagttcctcgcttacctgtgcagtctaattttgagctgcctctttgtagtcttaaaaggcaggagcttcgtgttgtgggtctgctaacccgtacgtttccgtgggcaagtcgtgtgtactcctcgcc

SEQ ID NO: 277 - DNA, 174 bp, synthetic construct
  misc_feature 1..174: note = Description of Artificial Sequence: Synthetic polynucleotide
  source 1..174: mol_type = other DNA
ctgccctcctgcttccgttgctagggacgcttcggccgaggataccgcaatggatcaggaagaggggctgaaggccttggacaatattgtcactcaattcaacgcctatgaagatttcctggactcgcagatcactactgtggacttgtactacctggaggatgaaaccctggc

SEQ ID NO: 278 - DNA, 174 bp, synthetic construct
  misc_feature 1..174: note = Description of Artificial Sequence: Synthetic polynucleotide
  source 1..174: mol_type = other DNA
ctgcgcggaagagtgctggccctggggaagccccttcctcacccaggcttcacacatttgaccctggctctctctcaggaggacccctcgctggaaaggcattttaagggccaccgagatgcagttacctgtgtggacttcagtatcaacacaaagcagctggccagtggctcc

SEQ ID NO: 279 - DNA, 174 bp, synthetic construct
  misc_feature 1..174: note = Description of Artificial Sequence: Synthetic polynucleotide
  source 1..174: mol_type = other DNA
ctgctccaagtgtcctagatcaggaccctaggtaaagacttctgaaaaatacttgagtctagaaacagaaaagaaaaagggctagtgtgctctaggggtttgcactgttgtacccagtttgctttgctgtgtcctaggaaaggtcctttctggggatcaccccattggctgaag

SEQ ID NO: 280 - DNA, 174 bp, synthetic construct
  misc_feature 1..174: note = Description of Artificial Sequence: Synthetic polynucleotide
  source 1..174: mol_type = other DNA
ctgctccttccgcgggtttccgactccctgccctagattttctgcttagcgacttggggtcccctctcgtttgcttctggtaggagtcgcaatcccagcagcaatagcccagaagaggacacggttcccgtaccgaagggttcagtaccagcagcccgaccatcacgcggcggg

SEQ ID NO: 281 - DNA, 174 bp, synthetic construct
  misc_feature 1..174: note = Description of Artificial Sequence: Synthetic polynucleotide
  source 1..174: mol_type = other DNA
ctgctctgctctctattgattgtgtttctggagggcgtcctgttgaattcccacttcattgtgtacatccccttccgttccccccaaaaatctgtgccacagggttactttttgaaagcgggaggaatcgagaagcacgatcttttggaaaacttggtgaacgcctaaataatc

SEQ ID NO: 282 - DNA, 174 bp, synthetic construct
  misc_feature 1..174: note = Description of Artificial Sequence: Synthetic polynucleotide
  source 1..174: mol_type = other DNA
ctgctctgtggtacttcctctctggctgatttagcaaacagcacctagacctggggccaggcctttggcagtgggacagatccagggataggctacaccaccctgccctgaccctgggattggcatcagcttccaaccagttcctgccaaagcttgtaagtcctcccgacggcc

SEQ ID NO: 283 - DNA, 174 bp, synthetic construct
  misc_feature 1..174: note = Description of Artificial Sequence: Synthetic polynucleotide
  source 1..174: mol_type = other DNA
ctgctgacaccttgatcttggacttcccatcttccaggaaggcctgacctcagttgttccagggtaaagaatttgggcagtgcccacacccacgctgttggataacatttcttcaccataccagtgagggtgaatgtgtacacgcccagcttcctgcctgttactctccacagt

SEQ ID NO: 284 - DNA, 174 bp, synthetic construct
  misc_feature 1..174: note = Description of Artificial Sequence: Synthetic polynucleotide
  source 1..174: mol_type = other DNA
ctgctgtgcagggcagggaagctccaggcaaacagcccagcaaacagcagcactcagctaaaaggaagactcacagaacacagttgaagaaggaaagtggcgatggacctcatcccaaatttggcggtggaaacctggcttctcctggctgtcagcctggtgctcctctatcta

SEQ ID NO: 285 - DNA, 174 bp, synthetic construct
  misc_feature 1..174: note = Description of Artificial Sequence: Synthetic polynucleotide
  source 1..174: mol_type = other DNA
ctggaaggtgaattcatttttctgggtctctctgattctcagggactccagaccttcctatttatgttgttttttgtattctatggaggaatcgtgtttggaaaccttcttattgtcataacagtggtatctgactcccaccttcactctcccatgtacttcctgctagccaac

SEQ ID NO: 286 - DNA, 174 bp, synthetic construct
  misc_feature 1..174: note = Description of Artificial Sequence: Synthetic polynucleotide
  source 1..174: mol_type = other DNA
ctggacgccttgctcctgcttctgctacgaccttctggggaaaacgaatttctcattttcttcttaaattgccattttcgctttaggagatgaatgttttcctttggctgttttggcaatgactctgaattaaagcgatgctaacgcctcttttccccctaattgttaaaagct

SEQ ID NO: 287 - DNA, 174 bp, synthetic construct
  misc_feature 1..174: note = Description of Artificial Sequence: Synthetic polynucleotide
  source 1..174: mol_type = other DNA
ctggccacgccctctccgcgagtccagtcccacgcgggatgaagagggcaccctccgccaagaggctgctgcgggacccgggtttcccctttccggcgccttccagcctcccaatcctcgggtctcgcctccctccgtctcctccctttcccctgtctgtctttccattggtcc

SEQ ID NO: 288 - DNA, 174 bp, synthetic construct
  misc_feature 1..174: note = Description of Artificial Sequence: Synthetic polynucleotide
  source 1..174: mol_type = other DNA
ctggggcccgctgtcggtctcccgtcctccgacatcttgtctggaacttccgcctggcagtctccagtaggagtggagctctgtgcggcgtagtttggtggaaaaacgggccttgcgtcggcctcacccccagtgtttgtgtttcagaatgaagactattctcagcaatcagac

SEQ ID NO: 289 - DNA, 174 bp, synthetic construct
  misc_feature 1..174: note = Description of Artificial Sequence: Synthetic polynucleotide
  source 1..174: mol_type = other DNA
ctggttcctgagggagaatccacaagccccctcccctcttcagtggatactgaagactccctcgacgaaggacccggggccctggtattggagagtgatttgctactaggccaggatctggagtttgaggaggaagaggaagaggaggaaggcgacggcaacagtgaccagctc

SEQ ID NO: 290 - DNA, 174 bp, synthetic construct
  misc_feature 1..174: note = Description of Artificial Sequence: Synthetic polynucleotide
  source 1..174: mol_type = other DNA
ctgtggcctcggggagtgggaagtggaggcaggagccttccttacacttcgccatgagtttcctcatcgactccagcatcatgattacctcccagcagataaccttgcctcgtacttactcaacaaaagtgaagccaaaagatactattttttggatttgggtggcttttcttc

SEQ ID NO: 291 - DNA, 174 bp, synthetic construct
  misc_feature 1..174: note = Description of Artificial Sequence: Synthetic polynucleotide
  source 1..174: mol_type = other DNA
ctgtttgaacgggctctcccttgggtgcttagccccgcccccgtcccactctgccctgttgctgtcgcgccgctgctggttgctgtccctggtggggtggaagacaacccgtgagtattacaccttcatgtgggttactttgcccattgacctaaacaacaaatcagctaaaca

SEQ ID NO: 292 - DNA, 174 bp, synthetic construct
  misc_feature 1..174: note = Description of Artificial Sequence: Synthetic polynucleotide
  source 1..174: mol_type = other DNA
cttcatctctccatctctgcgctgctgccggctgcgccatccagcacccagactccagcaccggccgaggacccccactccggctgcagggaccctgtcccagcgagaccgcaggcatgtcatccgaaaagtcaggactcccagactcagtccctcacacttctccgccgccct

SEQ ID NO: 293 - DNA, 174 bp, synthetic construct
  misc_feature 1..174: note = Description of Artificial Sequence: Synthetic polynucleotide
  source 1..174: mol_type = other DNA
cttcgcagagcatggcggcgggcgagcttgagggtggcaaacccctgagcgggctgctgaatgcgctggcccaggacactttccacgggtaccccggcatcacagaggagctgctacggagccagctatatccagaggtgccacccgaggagttccgcccctttctggcaaaga

SEQ ID NO: 294 - DNA, 174 bp, synthetic construct
  misc_feature 1..174: note = Description of Artificial Sequence: Synthetic polynucleotide
  source 1..174: mol_type = other DNA
cttgacaccagcagggtgacatccgctattgctacttctctgctcccccacagttcctctggacttctctggaccacagtcctctgccagacccctgccagaccccagtccaccatgatccatctgggtcacatcctcttcctgcttttgctcccagtggctgcagctcagacg

SEQ ID NO: 295 - DNA, 174 bp, synthetic construct
  misc_feature 1..174: note = Description of Artificial Sequence: Synthetic polynucleotide
  source 1..174: mol_type = other DNA
cttgccgcgctgcactccaccacgcctcctccaagtcccagcgaacccgcgtgcaacctgtcccgactctagccgcctcttcagctcgccatggatcccaactgctcctgcgccgccggtgactcctgcacctgcgccggctcctgcaaatgcaaagagtgcaaatgcacctcc

SEQ ID NO: 296 - DNA, 174 bp, synthetic construct
  misc_feature 1..174: note = Description of Artificial Sequence: Synthetic polynucleotide
  source 1..174: mol_type = other DNA
ctttatgttttgggattgtagttatgttagatattcctcagttggggtaattgtcttgcatcattatctcttatcataatctgtttttcttcacacagtgttatagttttgccgctggactcttccctcccttcccccaccccatcaggatgatatgagacttgaaagaagacg

SEQ ID NO: 297 - DNA, 174 bp, synthetic construct
  misc_feature 1..174: note = Description of Artificial Sequence: Synthetic polynucleotide
  source 1..174: mol_type = other DNA
ctttgaccacctgatattgcttacatctggaacttcttggcttctcattccccagatgtgcgggtcagagaggagaagtttcaggagtctctaaagaagctgaagaacgaggagcaggaagctgagaagctaacagcttttatcagagagaagaaaacatcctggaagaatcag

SEQ ID NO: 298 - DNA, 174 bp, synthetic construct
  misc_feature 1..174: note = Description of Artificial Sequence: Synthetic polynucleotide
  source 1..174: mol_type = other DNA
ctttgccaggaggctgcaccctgagatgccctctcaatttctccttcaggttcgcagagaacaggccagccaggaggtcaggaggccccagagaagcactgaagaagacctgcctgtgggtctcaattgcccagctccggcccacactctcctgctgccctgacctgagtcatc

SEQ ID NO: 299 - DNA, 174 bp, synthetic construct
  misc_feature 1..174: note = Description of Artificial Sequence: Synthetic polynucleotide
  source 1..174: mol_type = other DNA
cttttaacgagggaccgagctacttccgggagagaatgggagggtggaaaattttgtgcgtttggcgggtttcgctctcttcataagtattgatcattccgcagccctggggaccggacacgtgaggaggtagtgacgccgacactgccagaacacactgctacaaggtcccag

SEQ ID NO: 300 - DNA, 174 bp, synthetic construct
  misc_feature 1..174: note = Description of Artificial Sequence: Synthetic polynucleotide
  source 1..174: mol_type = other DNA
ctttttggagagtggtaatgtcttcctctttttgctttaggagaaagacagaataataagctgaatagaatctgaccattggctttcacctggccaggaccttctatgtagctctccttttgtggcccatgtgctgcatcctctgccctcagtgtgcaactggcccccaacgca

SEQ ID NO: 301 - DNA, 174 bp, synthetic construct
  misc_feature 1..174: note = Description of Artificial Sequence: Synthetic polynucleotide
  source 1..174: mol_type = other DNA
gaaattaactgttagcagtagtgtttcttaatacataagctatatcatactcctcaagtagattctttgcttaaaactttcactgtaaataattttatagcaaccatgtgaataacttaagaataatagaatcagtctcatttgtaggcactgtagaccatctccattccctac

SEQ ID NO: 302 - DNA, 174 bp, synthetic construct
  misc_feature 1..174: note = Description of Artificial Sequence: Synthetic polynucleotide
  source 1..174: mol_type = other DNA
gaacccgtttcttttccttccccagtgcgtctttcctgcgtcgttccggcgcggcgggagcagagatctgcggccgtttgcagcttgcggtagggaggcgtggtggtctgaagcctccgagcagccgcggccatggcggatgtaaccgcccgtagtctgcaatacgagtacaag

SEQ ID NO: 303 - DNA, 174 bp, synthetic construct
  misc_feature 1..174: note = Description of Artificial Sequence: Synthetic polynucleotide
  source 1..174: mol_type = other DNA
gaactgttccccagagcattgttcctgagaaggaaaagagtccaaacacctacccacacctgctttgtgccaagaatccacagttggattgcaaggacagtgcgttcaagacccagctgttgagagtagaaaagcagaagaaaggacccgaggtcagcaagtgccctccccaca

SEQ ID NO: 304 - DNA, 174 bp, synthetic construct
  misc_feature 1..174: note = Description of Artificial Sequence: Synthetic polynucleotide
  source 1..174: mol_type = other DNA
gaagaacctttgaattctaacggctgagctcttggaagacttgggtccttgggtcgcagggtctcactccattgcccaggccagagtgcggggatatttgataagaaacttcagtgaaggccgggcgcggtggctcatgcccgtaatcccagcattttcggaggccgaggcatc

SEQ ID NO: 305 - DNA, 174 bp, synthetic construct
  misc_feature 1..174: note = Description of Artificial Sequence: Synthetic polynucleotide
  source 1..174: mol_type = other DNA
gaagactgagcggttgtggccgcgttgccgacctccagcagcagtcggcttctctacgcagaacccgggagtaggagactcagaatcgaatctcttctccctccccttcttgtgagatttttttgatcttcagctacattttcggctttgtgagaaaccttaccatcaaacacg

SEQ ID NO: 306 - DNA, 174 bp, synthetic construct
  misc_feature 1..174: note = Description of Artificial Sequence: Synthetic polynucleotide
  source 1..174: mol_type = other DNA
gaagagtggaacccatacttgctggtctgatccatgcacaaggcggggctgctaggcctctgtgcccgggcttggaattcggtgcggatggccagctccgggatgacccgccgggacccgctcgcaaataaggtggccctggtaacggcctccaccgacgggatcggcttcgcc

SEQ ID NO: 307 - DNA, 174 bp, synthetic construct
  misc_feature 1..174: note = Description of Artificial Sequence: Synthetic polynucleotide
  source 1..174: mol_type = other DNA
gaagagtttgttggactcaacgaggttcgagaggcccagggaaaggtgacagagctcacaccccagtgacctcttctgggaatgcctcgctgggaatgcagctgagcctgtgtgggtgtggagagaaggtgcagatggcctccggttttctctttgcaggctgagaaagtgttc

SEQ ID NO: 308 - DNA, 174 bp, synthetic construct
  misc_feature 1..174: note = Description of Artificial Sequence: Synthetic polynucleotide
  source 1..174: mol_type = other DNA
gaaggatattgccgtaattctgaaagtttttttccttcctctcttcccttcgcagaggtgagtgccgggctcggcgctctgctcctggagctcccgcgggactgcctggggacagggactgctgtggcgctcggccctccactgcggacctctcctgagtgggtgcgccgagtc

SEQ ID NO: 309 - DNA, 174 bp, synthetic construct
  misc_feature 1..174: note = Description of Artificial Sequence: Synthetic polynucleotide
  source 1..174: mol_type = other DNA
gaaggatccgttttggcgggcggttggcgttgcgcagaaggcggcggcggtggtggcttgtggtgcggcctcaccatacaggaacagggcagacgttagcgtgagtgatcactctcaatcccggggacctggtggccttagtctttcaggtggaacggtgtgcgacatgggaaa

SEQ ID NO: 310 - DNA, 174 bp, synthetic construct
  misc_feature 1..174: note = Description of Artificial Sequence: Synthetic polynucleotide
  source 1..174: mol_type = other DNA
gaagtgtgtcagggccagcgtgccggccctacggaagccgagcctgaggcgagatctcgccttttgtattttcactgactcatatttcctttactcaggctcccacatcaggacgagaaggagccctcgagttaccgtgggagctgtgggagctgccctgtgactcttaggaag

SEQ ID NO: 311 - DNA, 174 bp, synthetic construct
  misc_feature 1..174: note = Description of Artificial Sequence: Synthetic polynucleotide
  source 1..174: mol_type = other DNA
gacaccccctgggatcacactgagcttgccacatccccaaggcggccgaaccctccgcaaccaccagcccaggttaatccccagaggctccatggagttccctggcctggggtccctggggacctcagagcccctcccccagtttgtggatcctgctctggtgtcctccacacc

SEQ ID NO: 312 - DNA, 174 bp, synthetic construct
  misc_feature 1..174: note = Description of Artificial Sequence: Synthetic polynucleotide
  source 1..174: mol_type = other DNA
gaccttctctttccctttccagcagccggagaagtgcgacaacaaccagtactttgatatctccgccctctcgtgtgttccttgtggagctaaccagaggcaagatgcccgaggtgttacagaagatggctggaactgcatttcttgccctagtgacttaactgccgaaggaaa

SEQ ID NO: 313 - DNA, 174 bp, synthetic construct
  misc_feature 1..174: note = Description of Artificial Sequence: Synthetic polynucleotide
  source 1..174: mol_type = other DNA
gacgccgatgcggagctgagctggctttcctccagggctctggactccctgctgagcaagagagaaagaggcccgcccttccaccaggacgcctgaccctggggtccttcccaaacccgggtctcttccgactccgggcccaacagtttgtgcgattaaagtgaagaaacaatg

SEQ ID NO: 314 - DNA, 174 bp, synthetic construct
  misc_feature 1..174: note = Description of Artificial Sequence: Synthetic polynucleotide
  source 1..174: mol_type = other DNA
gacgggcgctttggagccggccccaggcagcgtgtgtcggtcgcctagtctggagaactagtcctcgactcacgagatgaagttttaccatgttggccaggctggtctcgaattcctgacctcaagtgatctgcccaccttgacctcccaaagtgctgggattacagtgcaagg

SEQ ID NO: 315 - DNA, 174 bp, synthetic construct
  misc_feature 1..174: note = Description of Artificial Sequence: Synthetic polynucleotide
  source 1..174: mol_type = other DNA
gactacaaggagacagaaggctgaggccggggtgctagagaaccttgccgtgctggaattcacgttgacgcccccacggagctctgctgcagagccctcgagtcccgcacttccggccgccaggtggcgctggttctgttgccaactcggagagactgagctgggccacgcaag

SEQ ID NO: 316 - DNA, 174 bp, synthetic construct
  misc_feature 1..174: note = Description of Artificial Sequence: Synthetic polynucleotide
  source 1..174: mol_type = other DNA
gactgagcctcctgcttgaggtagttgtttttactcccagtccccaggctcacgagccccacgcgcgctcaatctgccctcccgcttctcctcgccactccgagttctgcgccctcgagatccagcgcatccgcggggtgggcgggtcctggcggctctttgccctcttccaac

SEQ ID NO: 317 - DNA, 174 bp, synthetic construct
  misc_feature 1..174: note = Description of Artificial Sequence: Synthetic polynucleotide
  source 1..174: mol_type = other DNA
gactggcactttttcttttttctcagcaaactgtacaaaaccaaatctctttttgattttcaaggaaactaggttcctgccaaattttgaatctggacaataaacagacactttgtcctagcatctttctggaatcatttcgggatattttccacaagcaacacagaaacagga

SEQ ID NO: 318 - DNA, 174 bp, synthetic construct
  misc_feature 1..174: note = Description of Artificial Sequence: Synthetic polynucleotide
  source 1..174: mol_type = other DNA
gacttctataaaaccctaagaggaggagctactgtgaaggtttctgcgtcttcaccctcactggctgtcgcttctcaatcagactccaagcagcgaagacttttggttgattttccaaaaggctcagtaagcaatgcgcagcagccagatctgtccaaagcagtttcactctca

SEQ ID NO: 319 - DNA, 174 bp, synthetic construct
  misc_feature 1..174: note = Description of Artificial Sequence: Synthetic polynucleotide
  source 1..174: mol_type = other DNA
gacttgctctctaaagttgcaattgtaagaagaatgttgggtttccagattgctcttctgggcgtgggagaaggttctgtctatcagtgctgcgagaaaggaaagaaacaagtttgctctcagcggatctttaaatggatgagatggctaccactcagatttccaaagatgagc

SEQ ID NO: 320 - DNA, 174 bp, synthetic construct
  misc_feature 1..174: note = Description of Artificial Sequence: Synthetic polynucleotide
  source 1..174: mol_type = other DNA
gagaaagaggacagagctgcccagtccttactcaacaagctgatcagaagcaaccttgttgataacacaaaccaagtggaagtcctgcagcgggatccaaactcccctctgtactcggtgaagtcttttgaagagcttcggctgaaaccacagcttctccaaggagtctatgcc

SEQ ID NO: 321 - DNA, 174 bp, synthetic construct
  misc_feature 1..174: note = Description of Artificial Sequence: Synthetic polynucleotide
  source 1..174: mol_type = other DNA
gagaatagttagcaaacaagggaggttgtcatttcctcatcgtcaagctttgttcctcgtgggggctagaaatctctttccagttccagattgtgaagggttcctgagtaagcagcgtgtctccatccccctctctaggggctcttggatggaccttgcactctagaagggaca

SEQ ID NO: 322 - DNA, 174 bp, synthetic construct
  misc_feature 1..174: note = Description of Artificial Sequence: Synthetic polynucleotide
  source 1..174: mol_type = other DNA
gagagaccttggagcgcgcgggaaagagaccaatataaactgtggcgggatagttttcgggtccttgtccagtgaaacaccctcggctgggaagtcagttcgttctctcctctcctctcttcttgtttgaacatggtgcggactaaagcagacagtgttccaggcacttacaga

SEQ ID NO: 323 - DNA, 174 bp, synthetic construct
  misc_feature 1..174: note = Description of Artificial Sequence: Synthetic polynucleotide
  source 1..174: mol_type = other DNA
gagaggcgcatctgcgcaggcgcccggctcctaagtctacccaggaactgaccctgctctctcctttccctgttagacatgggcactccacagaaggatgttattatcaagtcagatgcaccggacactttgttattggagaaacatgcagattatatcgcatcctatggctca

SEQ ID NO: 324 - DNA, 174 bp, synthetic construct
  misc_feature 1..174: note = Description of Artificial Sequence: Synthetic polynucleotide
  source 1..174: mol_type = other DNA
gagattttggactctgtcttcagctggacactccctccctgcaccatgtcttacagttgtggcctgcccagcctgagctgccgcaccagctgctcctcccggccctgtgtgccccccagctgccacggctgcaccctgcccggggcctgcaacatccccgccaatgtgagcaac

SEQ ID NO: 325 - DNA, 174 bp, synthetic construct
  misc_feature 1..174: note = Description of Artificial Sequence: Synthetic polynucleotide
  source 1..174: mol_type = other DNA
gagcagagccctttcacacacctcaggaacacctttcggctgcccgctccccagacacacctgcagccctgcccagccggctttgctcacccactgcttgtaaatgccccagatatgagccagcccaggccccgctacgtggtagacagagccgcatactcccttaccctcttc

SEQ ID NO: 326 - DNA, 174 bp, synthetic construct
  misc_feature 1..174: note = Description of Artificial Sequence: Synthetic polynucleotide
  source 1..174: mol_type = other DNA
gagcagggagtcagagacgccccgttccaggacccttgtcaccgggagacaggagcggggaggatctgtggggtcctgggttcagcactctgccctgctgccgctgaggagaggtcagccctgacaaaggtcagctagccccttgaggacatcagctttggcctcagggtccta

SEQ ID NO: 327 - DNA, 174 bp, synthetic construct
  misc_feature 1..174: note = Description of Artificial Sequence: Synthetic polynucleotide
  source 1..174: mol_type = other DNA
gagccgtacgcctctgtaaacccaacttcctcacctttgaaacagctgcctggttcagcattaatgaagattagtcagtgacaggcctggtgtgctgagtccgcacatagaagaatcaaaaatgtccaaaatgtaactggagagaaagtgggcaacttttggagaacttctgca

SEQ ID NO: 328 - DNA, 174 bp, synthetic construct
  misc_feature 1..174: note = Description of Artificial Sequence: Synthetic polynucleotide
  source 1..174: mol_type = other DNA
gaggaaggagagagtggaggaggagggctttgggttagggagagtgctttcgtttgttttaaatgggagaaactggagcatgttgccaagggcagagagccagcagagaggggtgaatggaagaaggagcgagaagggggttactgacgaagccttatcctggaggagagaagg

SEQ ID NO: 329 - DNA, 174 bp, synthetic construct
  misc_feature 1..174: note = Description of Artificial Sequence: Synthetic polynucleotide
  source 1..174: mol_type = other DNA
gaggagcctgaggaagagggcggcgacggtggtggtgactgagcggagcccggtgacaggatggctgggcacagattggtgttggtattaggagatctgcacatcccacaccggtgcaacagtttgccagctaaattcaaaaaactcctggtgccaggaaaaattcagcacatt

SEQ ID NO: 330 - DNA, 174 bp, synthetic construct
  misc_feature 1..174: note = Description of Artificial Sequence: Synthetic polynucleotide
  source 1..174: mol_type = other DNA
gaggcccagctgtaaattcctctctttgtactctttctctttatttctcagaccagccgacacttagggaaaatagaacctacgctgaaattttgggggcaggttctcttgctaggttttgaggttttgctgaagatattcctgaagaatcatcccaggtgccacactaaaaaa

SEQ ID NO: 331 - DNA, 174 bp, synthetic construct
  misc_feature 1..174: note = Description of Artificial Sequence: Synthetic polynucleotide
  source 1..174: mol_type = other DNA
gagggacatcttttcaagtagaggctgtgttggggcatggtgagagagggtcttagcaggtaaccttcctttcctctccagactgaggaatcagagttctgattgtggagtgcctctctctaggacggggctgcagcataggagtctcagctgcttacatccaggtccaggatt

SEQ ID NO: 332 - DNA, 174 bp, synthetic construct
  misc_feature 1..174: note = Description of Artificial Sequence: Synthetic polynucleotide
  source 1..174: mol_type = other DNA
gaggtcggagcggaaggacgtcgtggagattgcttgcgctggggtgccacacttaggctgagctgcaggttttcgcacagtcgcgagttaacctctgcttgctccagaggcctcgtcctaatccacctcggctgacggcgcgggatccctggctccgcgagcctcagcctcacc

SEQ ID NO: 333 - DNA, 174 bp, synthetic construct
  misc_feature 1..174: note = Description of Artificial Sequence: Synthetic polynucleotide
  source 1..174: mol_type = other DNA
gagtcacgtgggtccccccggttccggcgcggttgaggccttcggtggtgaacgagtctccagcaccatgtctggtttgtctggcccaccagcccggcgcggcccttttccgttagcgttgctgcttttgttcctgctcggccccagattggtccttgccatctccttccatct

SEQ ID NO: 334 - DNA, 174 bp, synthetic construct
  misc_feature 1..174: note = Description of Artificial Sequence: Synthetic polynucleotide
  source 1..174: mol_type = other DNA
gagtcctgctagatccccgcaagctaggccagctcctcccactgcctcccttcctctttctcctcctcttactcctttccagccagaccttggctgtctacaggatgggggacaccctgagccccggacatggcaaccacagagagagcagcccttttctttcccccttggagg

SEQ ID NO: 335 - DNA, 174 bp, synthetic construct
  misc_feature 1..174: note = Description of Artificial Sequence: Synthetic polynucleotide
  source 1..174: mol_type = other DNA
gagtggcagttatatagaccggcggcggagcacgcgtgtgtgcggacgcagttgcgtgaggggtttgtactatcctcggtgctgtggtgcagagctagttcctctccagctcagccgcgtaggtttggacatatttgactcttttccccccaggttgaattgaccaaagcaatg

SEQ ID NO: 336 - DNA, 174 bp, synthetic construct
  misc_feature 1..174: note = Description of Artificial Sequence: Synthetic polynucleotide
  source 1..174: mol_type = other DNA
gagttgcagtttgagagcagttccgggcagggaggcgcctttgctgccctcacagacttggcccctagcagtgcagaactacaagtcccagggatcctagcgaccgtccgtccgtagtcaagttgccggtggaattggcccaggatgacagctggagaatggagtcagttttat

SEQ ID NO: 337 - DNA, 174 bp, synthetic construct
  misc_feature 1..174: note = Description of Artificial Sequence: Synthetic polynucleotide
  source 1..174: mol_type = other DNA
gatctacaggagggcggctgtactgtgcttcgccttatatagggcgacttggggcacgcagtagctctctcgagtcactccggcgcagtgttgggactgtctgggtatcggaaagcaagcctacgttgctcactattacgtataatccttttcttttcaagatttttattttag

SEQ ID NO: 338 - DNA, 174 bp, synthetic construct
  misc_feature 1..174: note = Description of Artificial Sequence: Synthetic polynucleotide
  source 1..174: mol_type = other DNA
gatctactaagcatcatttttgcatgactactgcaaaaggattactttacagataccagttcctttgtcaagagcatactttggaccctgttttcagaaagcagggcactctttaatgaagaaacaccagagctgttaaacacattgagacacagaagattctagtgactgagg

SEQ ID NO: 339 - DNA, 174 bp, synthetic construct
  misc_feature 1..174: note = Description of Artificial Sequence: Synthetic polynucleotide
  source 1..174: mol_type = other DNA
gatgatgtcagcactgcttccggtcggtggcgcttctctctggcccgagccagcatgatccgctgggcccccagcgcatctcctggaagagcccactcaccctggacgagctcttcggtagcctcagaccgtccttgaagaggatgactgagacattatgggccacgcgctgtg

SEQ ID NO: 340 - DNA, 174 bp, synthetic construct
  misc_feature 1..174: note = Description of Artificial Sequence: Synthetic polynucleotide
  source 1..174: mol_type = other DNA
gatggcggcagcgatgcctgcccggctgttggggtggcggtgacgacaggcagcaaaagaccagataatgcctcacatctctgtccccccgggaccccctggagcccccatgatccctaagaagacagcttgaacctagaattcccctctccctccctagatctcacccccagg

SEQ ID NO: 341 - DNA, 174 bp, synthetic construct
  misc_feature 1..174: note = Description of Artificial Sequence: Synthetic polynucleotide
  source 1..174: mol_type = other DNA
gattacagtgccaaccttactcccaaagtttgccacgaaatatctcgcttctgttattttcgcatggttctggtatattgacttttgaaacaaaagacatcattctgtttatagcattctgtttttagtagtgggatttccatctacaaaatatagtaattctcgatcgctgaa

SEQ ID NO: 342 - DNA, 174 bp, synthetic construct
  misc_feature 1..174: note = Description of Artificial Sequence: Synthetic polynucleotide
  source 1..174: mol_type = other DNA
gattccgtagagacactcctccgctgcctgagtcctcggcgaacatggcggcccccgagtcagggccggctttgagtccaggcactgcagagggtgaggaggagacgattctctatgacttgttggtcaacaccgagtggccaccggagactgaagtacagcctagaggcaacc

SEQ ID NO: 343 - DNA, 174 bp, synthetic construct
  misc_feature 1..174: note = Description of Artificial Sequence: Synthetic polynucleotide
  source 1..174: mol_type = other DNA
gattggctgggacggctgtgggtggggagaagccgggaggactgggtgcgcctgcagggatcggaagccggttggggtgtgagaggttttctcgctctagggagattcttcaagcaatcactatgtcaacagacacaggtgtttcccttccttcatatgaggaagatcagggat

SEQ ID NO: 344 - DNA, 174 bp, synthetic construct
  misc_feature 1..174: note = Description of Artificial Sequence: Synthetic polynucleotide
  source 1..174: mol_type = other DNA
gcaaacaccgagctcctccagagccgcccgggagcagggagggctccgctagcccggggggccctccccgcggggcagatgagttccatatccagactctcaaaccatgttttgggatcatccaaacattccatcctcctgactccataaactattggattcataacctgctcc

SEQ ID NO: 345 - DNA, 174 bp, synthetic construct
  misc_feature 1..174: note = Description of Artificial Sequence: Synthetic polynucleotide
  source 1..174: mol_type = other DNA
gcaacacaaggattcccctccagctctgtgatgtggggagcagagggccactgagtcctgccatgggcatggtctagtggcccagtcaggacgcggaaacactccctggaggttctgacccactccctctcagcctccgcctggtctctggtgtagtcgccgccgccagccgcc

SEQ ID NO: 346 - DNA, 174 bp, synthetic construct
  misc_feature 1..174: note = Description of Artificial Sequence: Synthetic polynucleotide
  source 1..174: mol_type = other DNA
gcaagaaactgagagtgagaaagaagggactggccagagttactcagctagacagtgacagacaacagtggaacttctgattggcaaacgcactgcctacttacagcatagagacccccagtggagagctagactgtttgaattccagaaggaccaacaccagataaattatga

SEQ ID NO: 347 - DNA, 174 bp, synthetic construct
  misc_feature 1..174: note = Description of Artificial Sequence: Synthetic polynucleotide
  source 1..174: mol_type = other DNA
gcacacacgggcgcgcacacacacgcgcgtacacactgggtctccaggcagcggccgtcgccgcatccccggcagcagctccaggcaaagtgacagaggacagtgctgctgtgagtttgacgaagtggacatcacctgcagtcagtccagagctgcccagtcttgaatataatc

SEQ ID NO: 348 - DNA, 174 bp, synthetic construct
  misc_feature 1..174: note = Description of Artificial Sequence: Synthetic polynucleotide
  source 1..174: mol_type = other DNA
gcagaaagaatgtggattttagagttctagataggggttttcatttaggccttgcgacatggctgttacatgaccttggttggtctgtttccctaacctctttgtgcctcatttgtcttacctactaaataggctaatagtactacctcgcagcatgaagatgattttaataag

SEQ ID NO: 349 - DNA, 174 bp, synthetic construct
  misc_feature 1..174: note = Description of Artificial Sequence: Synthetic polynucleotide
  source 1..174: mol_type = other DNA
gcagattctgtggttatactcactcctcatcccaaagaatgaaatttaccactctcctcttcttggcagctgtagcaggggccctggtctatgctgaagatgcctcctctgactcgacgggtgctgatcctgcccaggaagctgggacctctaagcctaatgaagagatctcag

SEQ ID NO: 350 - DNA, 174 bp, synthetic construct
  misc_feature 1..174: note = Description of Artificial Sequence: Synthetic polynucleotide
  source 1..174: mol_type = other DNA
gcagccattttaattcatatttgagtgggcggtggcgattggtgttggcggtctggctcagctgggcagggggtaactttactgatttgggggtggtttttagtttaatttttcttttctagcttcccatcgacggtcagtgcgcacgttgtaatcagctgaggccatgtcagg

SEQ ID NO: 351 - DNA, 174 bp, synthetic construct
  misc_feature 1..174: note = Description of Artificial Sequence: Synthetic polynucleotide
  source 1..174: mol_type = other DNA
gcagcgcacacggccagctccgcgcaggcagactgcacagcccgccccaagggtcacgcccaccctgctaaggtgctaactttggacatctacttgagtaagactgagggggcacaagtggacgagccggtcgtgattactcccagagcggaagattgcggtgactgggacgac

SEQ ID NO: 352 - DNA, 174 bp, synthetic construct
  misc_feature 1..174: note = Description of Artificial Sequence: Synthetic polynucleotide
  source 1..174: mol_type = other DNA
gcataagttgtcagtccccagcagtgtttgggagccttaacaggcttgctaagtgcctgagattaaaggcgaagaggaagaagagcaagaagggcaacccggtgtttaacacacggctttcaggcgctctcaggtttcattttcctttggaatttctgctttacagacagaaca

SEQ ID NO: 353 - DNA, 174 bp, synthetic construct
  misc_feature 1..174: note = Description of Artificial Sequence: Synthetic polynucleotide
  source 1..174: mol_type = other DNA
gcatcctttcaatgacctgttttcttctgtaaccacaggttcggtggtgagaggaagcctcgcagaatccagcagaatcctcacagaatccagcagcagctctgctggggacatggtccatggtgcaacccacagcaaagccctgacctgacctcctgatgctcaggagaagcc

SEQ ID NO: 354 - DNA, 174 bp, synthetic construct
  misc_feature 1..174: note = Description of Artificial Sequence: Synthetic polynucleotide
  source 1..174: mol_type = other DNA
gcatgcgcactgggcgtccccacgccaccgcccatcagctgagaattgcagctgagggctccggggtaggtgggtgacggcggtcggaggtgtaggagggagccgtggaggtccaggtgactgcttagaaaactgcacagcatctgatgaaattagcgaataagaacatcaacc

SEQ ID NO: 355 - DNA, 174 bp, synthetic construct
  misc_feature 1..174: note = Description of Artificial Sequence: Synthetic polynucleotide
  source 1..174: mol_type = other DNA
gcatttgcaacactgagaagttatcttaagggaggctgggccccattctactcatctggcccagaaagtgaacaccttgggggccactaaggcagccctgctaggggagacgctccaacctgtcttctctctgtctcctggcagctctcttggcctcctagtttctacctaatc

SEQ ID NO: 356 - DNA, 174 bp, synthetic construct
  misc_feature 1..174: note = Description of Artificial Sequence: Synthetic polynucleotide
  source 1..174: mol_type = other DNA
gccaaacatctattaggcaaaattggcctcttgcccatgatttgactttccagcacagccagttctttttctcctctgcagctgattggctctggagtgtggccagaagcctctctcctgcaattaaaggagtcgggtctctaactgttgatctgtttttttcccttctgagca

SEQ ID NO: 357 - DNA, 174 bp, synthetic construct
  misc_feature 1..174: note = Description of Artificial Sequence: Synthetic polynucleotide
  source 1..174: mol_type = other DNA
gcccactttactgttttggctccagactgtcgttaagaatgtacagcctaattctggtgtgtttcgggatattcttctgtccagtattctggaagggcggggaggcatggcagcgttttacttgacgttgatggtgctgtgaagtccattctttcctctgcaagactactgact

SEQ ID NO: 358 - DNA, 174 bp, synthetic construct
  misc_feature 1..174: note = Description of Artificial Sequence: Synthetic polynucleotide
  source 1..174: mol_type = other DNA
gcccatggctgagacctctctcccagagctggggggagaggacaaagccacgccttgccccagcatcctggagctggaggagctcctgcgggcagggaagtcttcttgcagccgtgtggacgaagtttggcccaaccttttcataggagatgcagctggtccttactccctgcc

SEQ ID NO: 359 - DNA, 174 bp, synthetic construct
  misc_feature 1..174: note = Description of Artificial Sequence: Synthetic polynucleotide
  source 1..174: mol_type = other DNA
gcccccgccccctactcccttccctcaggccccaggaagttgcaagagtaccatttgtcgcacactcggggaccgcgggtggccggaggagatgaaaccgtcttggctgcagtgtcgtaaagtcaccagcgccggggggctcggagggcccttgcctgggtcctctccggcccg

SEQ ID NO: 360 - DNA, 174 bp, synthetic construct
  misc_feature 1..174: note = Description of Artificial Sequence: Synthetic polynucleotide
  source 1..174: mol_type = other DNA
gcccgcggtgcggtgcggagactccatgaggccctggacatgaacaagctgagtggaggcggcgggcgcaggactcgggtggaagggggccagcttgggggcgaggagtggacccgccacgggagctttgtcaataagcccacgcggggctggctgcatcccaacgacaaagtc

SEQ ID NO: 361 - DNA, 174 bp, synthetic construct
  misc_feature 1..174: note = Description of Artificial Sequence: Synthetic polynucleotide
  source 1..174: mol_type = other DNA
gcccgcggtgggccgacttcccctcctcttccctctctccttcctttagcccgctggcgccggacacgctgcgcctcatctcttggggcgttcttccccgttggccaaccgtcgcatcccgtgcaactttggggtagtggccgtttagtgttgaatgttccccaccgagagcgc

SEQ ID NO: 362 - DNA, 174 bp, synthetic construct
  misc_feature 1..174: note = Description of Artificial Sequence: Synthetic polynucleotide
  source 1..174: mol_type = other DNA
gcccggccacgcgcaagccgcagggcaccctcatactactacttctgccttattacccttaaaactggagtctcagttatttgtatcccactattggtttttttttaaatcttttttcgtgggtttgcccccttttcctcagctgcgtttctgtcttcagtcctgtagggcaca

SEQ ID NO: 363 - DNA, 174 bp, synthetic construct
  misc_feature 1..174: note = Description of Artificial Sequence: Synthetic polynucleotide
  source 1..174: mol_type = other DNA
gccctgggggatttttttcttctatgcctctctggtggaatgacatttgctgtgtaggcatctttcctctgactgtatttcttggccttgaagagtactgagtttaaaaagacagtatgtgacagtccatggaaattgcctcttctgtgaaatctcgccacctgctccgaagac

SEQ ID NO: 364 - DNA, 174 bp, synthetic construct
  misc_feature 1..174: note = Description of Artificial Sequence: Synthetic polynucleotide
  source 1..174: mol_type = other DNA
gccgaagcggcgggatgagcggagccggcgtgggcggggcgtccgaggagagccaggccatgcaggcccacgtgtctattatcctcccagtccacaacgctgaaccgtggctggacgaatgtttgaggtctgttttgcaacaggactttgaaggtaccatggagctgtctgttt

SEQ ID NO: 365 - DNA, 174 bp, synthetic construct
  misc_feature 1..174: note = Description of Artificial Sequence: Synthetic polynucleotide
  source 1..174: mol_type = other DNA
gccgacttggaaatgtgaacgcaagaagcaggcttgatttttttttctccccccttctctctctctctctctctctctcttcctctctccctctttctcctctctcacccacactcacgcacacctccaaaccgcacacccagacgcacacgcataccccagcgcccggcagtt

SEQ ID NO: 366 - DNA, 174 bp, synthetic construct
  misc_feature 1..174: note = Description of Artificial Sequence: Synthetic polynucleotide
  source 1..174: mol_type = other DNA
gccgcaggcgcgctaggagaactatgccatttttgggtcaggactggagatctcctggatggagttggattaagacagaagatggctggaagagatgtgaatcttgtagtcagaaacttgaaagagagaataaccgttgtaacatcagtcacagcattatcttaaatagtgaag

SEQ ID NO: 367 - DNA, 174 bp, synthetic construct
  misc_feature 1..174: note = Description of Artificial Sequence: Synthetic polynucleotide
  source 1..174: mol_type = other DNA
gccgccatattgaataagcgacccggcctcctagggggtcgtcgtggtccagacagtttagcagaacagcctccgcggctccggggagaagcaatatgttaaggatacctgtaagaaaggccttagtaggcctttctaagtctcctaaaggatgtggcttgtgagaaggttggc

SEQ ID NO: 368 - DNA, 174 bp, synthetic construct
  misc_feature 1..174: note = Description of Artificial Sequence: Synthetic polynucleotide
  source 1..174: mol_type = other DNA
gcctctggggttttatattgctctggtattcatgccaaagacacaccagccctcagtcactgggagaagaacctctcataccctcggtgctccagtccccagctcactcagccacacacaccatgtgtgaagaggagaccaccgcgctcgtgtgtgacaatggctctggcctgt

SEQ ID NO: 369 - DNA, 174 bp, synthetic construct
  misc_feature 1..174: note = Description of Artificial Sequence: Synthetic polynucleotide
  source 1..174: mol_type = other DNA
gcctgtgctgtgcctgcctcctagagctcattccctacgccccgactctgtcctggacagcgtgcccaccagccatggcggggccccggggcctcctcccactctgcctcctggccttctgcctggcaggcttcagcttcgtcagggggcaggtgctgttcaaaggctgtgatg

SEQ ID NO: 370 - DNA, 174 bp, synthetic construct
  misc_feature 1..174: note = Description of Artificial Sequence: Synthetic polynucleotide
  source 1..174: mol_type = other DNA
gccttccatccctgctcctgcaccggtctgcatctcccagcagaaggcgcagccatgaatccgttattcggccccaacctcttcctcctgcagcaggagcagcagggcctggccgggccactgggggactcactgggaggcgaccacttcgccgggggaggagacttgcccccg

SEQ ID NO: 371 - DNA, 174 bp, synthetic construct
  misc_feature 1..174: note = Description of Artificial Sequence: Synthetic polynucleotide
  source 1..174: mol_type = other DNA
gcgaaaggggagctgttggaattcaaatagactttctggttcccagcagtcggcagtaatagaatgctttcaggaagatgacagaatcaggagaaagatgctgttttgcactatcttgatttgttacagcagccaacttattggcatgatggagtgacaggaaaaacagctggc

SEQ ID NO: 372 - DNA, 174 bp, synthetic construct
  misc_feature 1..174: note = Description of Artificial Sequence: Synthetic polynucleotide
  source 1..174: mol_type = other DNA
gcgaggggaccctgtggggcttgggacgagagacgggggtctttccgtgggaaccgagctaggtgccgggcaagagacgcgcggctggcccacctggatcctggccaactcgggattgagttcgttcctggtctcagaaggcccgttttgctttcagggaggagcttgtgaaaa

SEQ ID NO: 373 - DNA, 174 bp, synthetic construct
  misc_feature 1..174: note = Description of Artificial Sequence: Synthetic polynucleotide
  source 1..174: mol_type = other DNA
gcgcactcagggtctgaggcagctagtagccggagggtcaccatgaagttcaatcccttcgttacctgggaccgcagtaaaaaccgcaaacgtcacttcaatgccccctcacacgtgcgcaggaagatcatgtcatccccgctctccaaggagctgcggcagaagtacaatgtc

SEQ ID NO: 374 - DNA, 174 bp, synthetic construct
  misc_feature 1..174: note = Description of Artificial Sequence: Synthetic polynucleotide
  source 1..174: mol_type = other DNA
gcgccagcttggagagccagccccatcggggttccccgccgccggaagcggaaatagcaccgggcgccgccacagtagctgtaactgccaccgcgatgccgaaggcgcccaagcagcagccgccggagcccgagtggatcggggacggagagagcacgagcccatcagacaaag

SEQ ID NO: 375 - DNA, 174 bp, synthetic construct
  misc_feature 1..174: note = Description of Artificial Sequence: Synthetic polynucleotide
  source 1..174: mol_type = other DNA
gcgccctgcagataagagccccaggccctgcagtcaactctgggaggccgtgggctggactttcaggctgaacccaccccacatttctccctcgggaatctgattaaggcagtgattcttcattgcctgccctcctgtccacactcctgcctactgccacccacaagggtcatc

SEQ ID NO: 376 - DNA, 174 bp, synthetic construct
  misc_feature 1..174: note = Description of Artificial Sequence: Synthetic polynucleotide
  source 1..174: mol_type = other DNA
gcgggggcggggcacctctgtgcagggttcccagtcaccgcgacgctcctcgggaagccatagggcgcctcccagcccgtctccccgctccagtttagaacctaattcccaattccgggaccgggcccagccctgggctcttactgtccgcttttgctgggacctgttccacaa

SEQ ID NO: 377 - DNA, 174 bp, synthetic construct
  misc_feature 1..174: note = Description of Artificial Sequence: Synthetic polynucleotide
  source 1..174: mol_type = other DNA
gcggtcttttcctcccactcttggctggttggaccccgctatggaaaagttggcccctgagccagagctccagcagccttgttagggcgtggcctgaggcttggataagtgggatgtaaaacgaagatcaggagcagatttgaagaattacaaagtgaattggtgccagtcagc

SEQ ID NO: 378 - DNA, 174 bp, synthetic construct
  misc_feature 1..174: note = Description of Artificial Sequence: Synthetic polynucleotide
  source 1..174: mol_type = other DNA
gctcctgcgcgctgaggctccggcggacctctggtggacatggctgcttcccgcttacccccagcgacgctaacgttaaagcagttcgtaagaaggcaacaagttcttctcctctacagaaggattttgcaaacaattcggcaagttccaaatgattctgatcgcaaatacctg

SEQ ID NO: 379 - DNA, 174 bp, synthetic construct
  misc_feature 1..174: note = Description of Artificial Sequence: Synthetic polynucleotide
  source 1..174: mol_type = other DNA
gctctgaaagtgttccagctgaaatttcagatcggacagactcgctgcggctccggaggcagtgattccaagctgctcgcgcacgctgctgccaagctgcaggatggtgcacgtagccaggctgctgctgctgctcctcactttcttcctccgcacggatgctgagacacctcc

SEQ ID NO: 380 - DNA, 174 bp, synthetic construct
  misc_feature 1..174: note = Description of Artificial Sequence: Synthetic polynucleotide
  source 1..174: mol_type = other DNA
gctcttagtcgcgggccgactggtgtttatccgtcactcgccgaggttccttgggtcatggtgccagcctgactgagaagaggacgctcccgggagacgaatgaggaaccacctcctcctactgttcaagtacaggggcctggtccgcaaagggaagaaaagcaaaagacgaaa

SEQ ID NO: 381 - DNA, 174 bp, synthetic construct
  misc_feature 1..174: note = Description of Artificial Sequence: Synthetic polynucleotide
  source 1..174: mol_type = other DNA
gctgaccacaggagccggtgctggggactgagggaaacttagagttcagagagggggtgtgatttgcctgaggtcacacagcaagttagagacccagctccacgactcattgtcttggctttggccctcgtcatcctgcccacccagcggggcttcccaacccaccacacagcc

SEQ ID NO: 382 - DNA, 174 bp, synthetic construct
  misc_feature 1..174: note = Description of Artificial Sequence: Synthetic polynucleotide
  source 1..174: mol_type = other DNA
gctgactgccactaccagccggagccagggcctggtcgagacaactatttttgaggtatctgaggctaccccacagcactctctggcattggcaagactcgtggctgtgacccatgggcctctgaggaggcgttgtaagtccgcccagctccccacttgctgtgctctcactca

SEQ ID NO: 383 - DNA, 174 bp, synthetic construct
  misc_feature 1..174: note = Description of Artificial Sequence: Synthetic polynucleotide
  source 1..174: mol_type = other DNA
gctgagccatgacccatgaaccatggaagcttgactctagattgaccatcttgagatgccaaagatgtccacgtcctaatcccatgtgggagacagaataatggccctgcagaccttcccagctggccatgacccctcatttgaccagctcttcccttctctctgaccagcacc

SEQ ID NO: 384 - DNA, 174 bp, synthetic construct
  misc_feature 1..174: note = Description of Artificial Sequence: Synthetic polynucleotide
  source 1..174: mol_type = other DNA
gctgtgagggttactatgctccctctttgccgccgtctcctcctcttgcccgcgcaggcacccctctggctgctcagtcctgcctcagtgtcaaaccagaagagaagtaaaattcaacaaaaatttatgtgtggagttccttcttaaaagaagaaaaaagtgattatttagact

SEQ ID NO: 385 - DNA, 174 bp, synthetic construct
  misc_feature 1..174: note = Description of Artificial Sequence: Synthetic polynucleotide
  source 1..174: mol_type = other DNA
gcttaggagcacccaccaagctctggcagggtctccagcacccatctcgggcagaggctgggggagtgactgctggtgcaagccccaaagtgcatgcggcaaaaacatggatgcagagctggtggcaagaagaggggctaagttatagagtcaacgtggaggtaccaggccacc

SEQ ID NO: 386 - DNA, 174 bp, synthetic construct
  misc_feature 1..174: note = Description of Artificial Sequence: Synthetic polynucleotide
  source 1..174: mol_type = other DNA
gcttccgtagaggccagctggttgctacgcagcaacaggaaacattccgcgctaccgagtactttctactcccgaccaggcattgctctctctggagaccctcggcggtggttgctgtattttgacttggagtaaggatgacttttcgggccacagatagtgaatttgacctga

SEQ ID NO: 387 - DNA, 174 bp, synthetic construct
  misc_feature 1..174: note = Description of Artificial Sequence: Synthetic polynucleotide
  source 1..174: mol_type = other DNA
gcttgggtaggggccaggctagcctgagtgcacccagatgcgcttctgtcagctctccctagtgcttcaaccactgctctccctgctctactttttttgctccagctcagggatgggggtgggcagggaaatcctgccaccctcacttctccccttcccatctccaggggggcc

SEQ ID NO: 388 - DNA, 174 bp, synthetic construct
  misc_feature 1..174: note = Description of Artificial Sequence: Synthetic polynucleotide
  source 1..174: mol_type = other DNA
gctttccttttagcttttgtaagttacacgtcaaaatggccgatctgacatcggtgctcacttctgttatgttttctccctctagtaaaatgtttatcggtggactgagctggcagacctcaccagatagccttagagactattttagcaaatttggagaaattagagaatgta

SEQ ID NO: 389 - DNA, 174 bp, synthetic construct
  misc_feature 1..174: note = Description of Artificial Sequence: Synthetic polynucleotide
  source 1..174: mol_type = other DNA
ggaaccgccctgctgccgccgcctgcttcctctgctcgcggttagcccgtcagtccctgctctgtgcgcgcctccatctgggccatggatggcggggatctgatgagcttctttcttctggcatcattaacggaccttttaccatgaatagttctactccttctacaggtgtgt

SEQ ID NO: 390 - DNA, 174 bp, synthetic construct
  misc_feature 1..174: note = Description of Artificial Sequence: Synthetic polynucleotide
  source 1..174: mol_type = other DNA
ggaaggaggctgagtgactactggactggatattgactctaactcttgtttccaagcttatatcctcaatcacctaaagatcagagtgtgaagaaacaaacctgtgacagatctgtggttgaggtttagactgggggaggagtatagtactggactttctttgtaacttgtacc

SEQ ID NO: 391 - DNA, 174 bp, synthetic construct
  misc_feature 1..174: note = Description of Artificial Sequence: Synthetic polynucleotide
  source 1..174: mol_type = other DNA
ggaaggcagagctgcaatctagttaactacctcctttcccctagatttcctttcattctgctcaagtcttcgcctgtgtccgatccctatctactttctctcctcttgtaggcaagcctcagactccaggcttgagctaggttttgtttttctcctggtgagaattcgaagacc

SEQ ID NO: 392 - DNA, 174 bp, synthetic construct
  misc_feature 1..174: note = Description of Artificial Sequence: Synthetic polynucleotide
  source 1..174: mol_type = other DNA
ggaagtagggcctgatgtaaacacccgagccgggctccaaggcccgggaggtcagaaaaccgggccgcgggcggcaccgacagctggggcccgggtcagggacacgcggaggtcaggccggtgaaggcggcaggaagctggagcacgatcccaggaggaacaatcctgcaccat

SEQ ID NO: 393 - DNA, 174 bp, synthetic construct
  misc_feature 1..174: note = Description of Artificial Sequence: Synthetic polynucleotide
  source 1..174: mol_type = other DNA
ggaagtgccgaatggggaccaagatggcggaccttgattcgcctccgaagctgtcaggggtgcagcagccgtctgagggggtgggaggtggccgctgctccgaaatctccgctgagctcattcgctccctgacagagctgcaggagctggaggctgtatacgaacggctctgcg

SEQ ID NO: 394 - DNA, 174 bp, synthetic construct
  misc_feature 1..174: note = Description of Artificial Sequence: Synthetic polynucleotide
  source 1..174: mol_type = other DNA
ggaagtggctctcagggcgcttccggggaccaggcccgcttttggctgcatcagccggggattgccggcgccaggcatctgcatctgggaccgacctcctgggctggctgatcaaagaggaagcagcagcaatgtctgctgtgggggctgcaactccatacctgcatcatcctg

SEQ ID NO: 395 - DNA, 174 bp, synthetic construct
  misc_feature 1..174: note = Description of Artificial Sequence: Synthetic polynucleotide
  source 1..174: mol_type = other DNA
ggaatacctaggcctccagactactccccctaactcatatttagattcctgaagcttctgcacatgtagttcctagagctgctgcttattaaaatgtcaacatcttcatcttctagctgggacaacctcttagagtctctctctctcagcacagtatggaattggatacaagca

SEQ ID NO: 396 - DNA, 174 bp, synthetic construct
  misc_feature 1..174: note = Description of Artificial Sequence: Synthetic polynucleotide
  source 1..174: mol_type = other DNA
ggaccggtgtgctaggagatgatcggggaaagcatagtcccctgtctgtggcaccagacactcccgactgtgcgctgactctccccgcccagccagcagccttttccagagaggctgtggtccatagcctctgttcgttttcactgcaggaccaggcacgaaagttaaaacaaa

SEQ ID NO: 397 - DNA, 174 bp, synthetic construct
  misc_feature 1..174: note = Description of Artificial Sequence: Synthetic polynucleotide
  source 1..174: mol_type = other DNA
ggagcccggttaggaagaatggagttggcgactcgctaccagagcacttcgcaggcatagtttggaagtcatcagggctggttcttttccttccagatccctaaagaagtggctgacatctttaacgcccccagtgatgatgaagagtttgttggcttccgagatgatgttccc

SEQ ID NO: 398 - DNA, 174 bp, synthetic construct
  misc_feature 1..174: note = Description of Artificial Sequence: Synthetic polynucleotide
  source 1..174: mol_type = other DNA
ggagccgtccgcctacgggggccgggacgtcgcctgcgcgtctctcgttttcggacggctgcagcatcgcggtggggatcgaaagcgggggcttctgggacgcagctctggagacgcggcctcggaccagccatttcggtgtagaagtggcagcacggcagactggtcaaacaa

SEQ ID NO: 399 - DNA, 174 bp, synthetic construct
  misc_feature 1..174: note = Description of Artificial Sequence: Synthetic polynucleotide
  source 1..174: mol_type = other DNA
ggagcctcatctcctcggtgtctgcgagattaatctctcatggccgctgcacaagaacctggcttttagctgaactaaggagaaagtcctacaacagtttggcgtgcaacatggggcttgagaaaggatgaggacggggacttggttgccttttccagtgacgaggaattgaca

SEQ ID NO: 400 - DNA, 174 bp, synthetic construct
  misc_feature 1..174: note = Description of Artificial Sequence: Synthetic polynucleotide
  source 1..174: mol_type = other DNA
ggagctttctattggtcctgggtaccgagcatgggcgctgcgtcagtgcgcgctggcgcaaggttggtggaagtcgcgttgtgcaggttcgtgcccggctggcgcggcgtggtttcactgttacatgccttgaagtgatgaggaggtttctgttactatatgctacacagcagg

SEQ ID NO: 401 - DNA, 174 bp, synthetic construct
  misc_feature 1..174: note = Description of Artificial Sequence: Synthetic polynucleotide
  source 1..174: mol_type = other DNA
ggcagaaaactaactgaaaaacgagaacctactgtatggttagtaatttcttccatgtcatacaagtattcgagaaatctgctaccttgattagtaagactgaacacattggttttgtcatttattcatggaggaagtccaccacccacttggggagcagaaggaaatttgcca

SEQ ID NO: 402 - DNA, 174 bp, synthetic construct
  misc_feature 1..174: note = Description of Artificial Sequence: Synthetic polynucleotide
  source 1..174: mol_type = other DNA
ggcatagcaagatggcctgccctcaggtacaggaagaaggaatggaatcggaaggaagaaaattcattccagagacaaaatagctcccctcctctgttgtagctgttcctctggcaatacaaactttctgctttcaggttctgcagcattccagaccttgagcactgaatcagg

SEQ ID NO: 403 - DNA, 174 bp, synthetic construct
  misc_feature 1..174: note = Description of Artificial Sequence: Synthetic polynucleotide
  source 1..174: mol_type = other DNA
ggccacagtgcgcatgtgtgcggctgtgctttggctcttcgggtaaagatggcggagcgcgggtacagcttttcgctgactacattcagcccgtctggtaaacttgtccagattgaatatgctttggctgctgtagctggaggagccccgtccgtgggaattaaagctgcaaat

SEQ ID NO: 404 - DNA, 174 bp, synthetic construct
  misc_feature 1..174: note = Description of Artificial Sequence: Synthetic polynucleotide
  source 1..174: mol_type = other DNA
ggccagaaaagccaaacttaagaaatctgcctatgtacagaacaagtcaactaaggggttctcattaatctaccgtctgtgaatatcgttatttttcaggagaagcgctacaaagcagccactgtgcttactgaacggcctccccctgtatcgcttaattgagaaggtatacaa

SEQ ID NO: 405 - DNA, 174 bp, synthetic construct
  misc_feature 1..174: note = Description of Artificial Sequence: Synthetic polynucleotide
  source 1..174: mol_type = other DNA
ggccccaggcagctggggtattccttaggggctgagtctcctggtatccctaagactgggcttggcttaggcactgaggactttttcctggccattatcctgcaggacagcagcgcagattccttctggaaccccaacgccttcgagacggattccgacctgccggctggatgg

SEQ ID NO: 406 - DNA, 174 bp, synthetic construct
  misc_feature 1..174: note = Description of Artificial Sequence: Synthetic polynucleotide
  source 1..174: mol_type = other DNA
ggcgaggagaggcacaccactattgttttaatttgcttttacctgattcctggcagacttctgcgttatgacccggctgctgggctacgtggaccccctggatcccagctttgtggctgccgtcatcaccatcaccttcaatccgctctactggaatgtggttgcacgatggga

SEQ ID NO: 407 - DNA, 174 bp, synthetic construct
  misc_feature 1..174: note = Description of Artificial Sequence: Synthetic polynucleotide
  source 1..174: mol_type = other DNA
ggcggaggtggggttagcttcagttgaccaaccatgccttgaggataaattggatgggatcagatgggaagatgtgacaagaagagaaatcctcctctatataggatgctctgctgtttcctaaggattttcagcaccttgccccaaaatcaaaatgatgcttcaacacccagg

SEQ ID NO: 408 - DNA, 174 bp, synthetic construct
  misc_feature 1..174: note = Description of Artificial Sequence: Synthetic polynucleotide
  source 1..174: mol_type = other DNA
ggcggcgcaggggcggggctttacggacgcaagcacgtcgaagcgctgctcctggagccgcggagggtgcgggtttggctgcggtggtttctgtggcggttgctgtggcggagtttggaggttggagagaaatccaggtactcactagactggtaccttctgccaccatggggg

SEQ ID NO: 409 - DNA, 174 bp, synthetic construct
  misc_feature 1..174: note = Description of Artificial Sequence: Synthetic polynucleotide
  source 1..174: mol_type = other DNA
ggcggggagaagccgagctgagcggatcctcacacgactgtgatccgattctttccagcggcttctgcaaccaagcgggtcttacccccggtcctccgcgtctccagtcctcgcacctggaaccccaacgtccccgagagtccccgaatccccgctcccaggctacctaagagg

SEQ ID NO: 410 - DNA, 174 bp, synthetic construct
  misc_feature 1..174: note = Description of Artificial Sequence: Synthetic polynucleotide
  source 1..174: mol_type = other DNA
ggcggttggtgcggcctccattgttcgtgttttaaggcgccatgaggggtgacagaggccgtggtcgtggtgggcgctttggttccagaggaggcccaggaggagggttcaggccctttgtaccacatatcccatttgacttctatttgttgtttacttctggtttagtgtgaa

SEQ ID NO: 411 - DNA, 174 bp, synthetic construct
  misc_feature 1..174: note = Description of Artificial Sequence: Synthetic polynucleotide
  source 1..174: mol_type = other DNA
ggctaccatggtaacaggttccagggtaacagaggagggagctgggtcctgtttactcccagtcctgccgatgaggattctgaccgtagacactgaattgtcccgtacctatccgtgctctttctgtgttctcaccagggctgagctcgaactgccacctctgccagcaggacc

SEQ ID NO: 412 - DNA, 174 bp, synthetic construct
  misc_feature 1..174: note = Description of Artificial Sequence: Synthetic polynucleotide
  source 1..174: mol_type = other DNA
ggctctcaggaggtccttgttccagggaacagctgcttctctggggctgggctctactccctgcagcccctcgcactacccagctggaaccagggacaacgcctgagtccaaccctcgtgtctattttccagaaaacgggcaatgctgtgagagccattggaagactgtcctct

SEQ ID NO: 413 - DNA, 174 bp, synthetic construct
  misc_feature 1..174: note = Description of Artificial Sequence: Synthetic polynucleotide
  source 1..174: mol_type = other DNA
ggctgccagcttcctttcggcccctgcttttgtgctccctccgctcccaaactgtacctgtcacagaccaggaaaaatgtttgctgtgctgcgtctgttggcgagtcccctcctcacccggttcccttcctctgcatcctttcctcagcttgagaaacacctctttgccccgtc

SEQ ID NO: 414 - DNA, 174 bp, synthetic construct
  misc_feature 1..174: note = Description of Artificial Sequence: Synthetic polynucleotide
  source 1..174: mol_type = other DNA
ggctgcggccccggctccggcccccgcaggagcagcaccccccggggaaagacattttctgctcccaccgagttggcagggcctgcttcctgaatctcctgggtgtgtcttaactgccagtcccagcacctcctgaaagccccactctcctccagtggtcacagtggaaggatc

SEQ ID NO: 415 - DNA, 174 bp, synthetic construct
  misc_feature 1..174: note = Description of Artificial Sequence: Synthetic polynucleotide
  source 1..174: mol_type = other DNA
ggcttccgggatgtggcggggcctttgtctctggctgcagttggagctctgcgtctcgtcttcgttcttctgtgtcctctgctgctagaggtccagcctctgtggctctgtgacctgcgggtattgggggatccacagctaagacgccaggaccccccggaagcctagaaatgg

SEQ ID NO: 416 - DNA, 174 bp, synthetic construct
  misc_feature 1..174: note = Description of Artificial Sequence: Synthetic polynucleotide
  source 1..174: mol_type = other DNA
ggcttttagctggcttgtctgtcataattcatgattcggggctgggaaaaagaccaacagcctacgtgccaaaaaaggggcagagtttgatggagttgggtggacttttctatgccatttgcctccacacctagaggataagcacttttgcagacattcagtgcaagggagatc

SEQ ID NO: 417 - DNA, 174 bp, synthetic construct
  misc_feature 1..174: note = Description of Artificial Sequence: Synthetic polynucleotide
  source 1..174: mol_type = other DNA
gggacaaggcgtcggttctcgcctgagggccaaaccttgcccctgcccaccttcctcacccccgccatttccaggactcacatccaaaggcgacagcaccaggatttgctcccgcctttggcacagaggaggacgggtccctctctcagcctggccagtctttcccagggcttg

SEQ ID NO: 418 - DNA, 174 bp, synthetic construct
  misc_feature 1..174: note = Description of Artificial Sequence: Synthetic polynucleotide
  source 1..174: mol_type = other DNA
gggagtgcgagccacaggccaggcactctccttctcccattagctcagccgtggcatcggacttgcagcttcattttgggctgccttagccatgaagctccttttgctgactttgactgtgctgctgctcttatcccagctgactccaggtggcacccaaagatgctggaatct

SEQ ID NO: 419 - DNA, 174 bp, synthetic construct
  misc_feature 1..174: note = Description of Artificial Sequence: Synthetic polynucleotide
  source 1..174: mol_type = other DNA
gggataaacggagctggacgactcagtctcttggtctgtggctgctgcggttacctggatgggcgagcacctctgaggctggctttgttacctgggcaataagggactagcagttcagccgttttctatgcctgctggatttgtttgtatttgttcccagccactgctcatgta

SEQ ID NO: 420 - DNA, 174 bp, synthetic construct
  misc_feature 1..174: note = Description of Artificial Sequence: Synthetic polynucleotide
  source 1..174: mol_type = other DNA
gggcacgagggcagagccagttcctagcgcagagccgcgcccgccatgagggagatcgtgcacatccaggcgggccagtgcgggaaccagatcggcaccaagttttgggaagtgatcagcgatgagcacggcatcgacccggccggaggctacgtgggagactcggcgctgcag

SEQ ID NO: 421 - DNA, 174 bp, synthetic construct
  misc_feature 1..174: note = Description of Artificial Sequence: Synthetic polynucleotide
  source 1..174: mol_type = other DNA
gggcacttggagttgtcttaggactgatgtctgaattaactaaatgaacttgtctggtttgcagagtgctgatggcagagattggtgaggatttggataaatctgatgtgtcctcattaattttcctcatgaaggattacatgggccgaggcaagataagcaaggagaagagtt

SEQ ID NO: 422 - DNA, 174 bp, synthetic construct
  misc_feature 1..174: note = Description of Artificial Sequence: Synthetic polynucleotide
  source 1..174: mol_type = other DNA
gggctctccggcagcggatctgcgcagaagcgttccgtgcgtgcaagtgctgcgaaccacgtgggtcccgggcgcgtttcgggtgctggcggctgcagccggagttcaaacctaagcagctggaaggaaccatggccaactgtgagcgtaccttcattgcgatcaaaccagatg

SEQ ID NO: 423 - DNA, 174 bp, synthetic construct
  misc_feature 1..174: note = Description of Artificial Sequence: Synthetic polynucleotide
  source 1..174: mol_type = other DNA
gggctggagacgggacccgacggtgactgcgcaagcaaggaatagtgtctggagccggtccagctgaaggaagggtgagcagagagtgcaagcaggacccttgtcggtgggtgaacattttgctccaaaagggatccttggccctgcgcaggtggatttcagtgtgttctttgg

SEQ ID NO: 424 - DNA, 174 bp, synthetic construct
  misc_feature 1..174: note = Description of Artificial Sequence: Synthetic polynucleotide
  source 1..174: mol_type = other DNA
ggggagggaggcggttagcgggctttagcgccttttctggcggcggtagatttgaagcgcttcaaaggaccggacccagagaagaggaaaactctaccggtgcaggagcacagggatcagttgtccttgtttttttttggtcttttcttcatttgaagattaagtattggagcc

SEQ ID NO: 425 - DNA, 174 bp, synthetic construct
  misc_feature 1..174: note = Description of Artificial Sequence: Synthetic polynucleotide
  source 1..174: mol_type = other DNA
ggggccgcgacctcggctcgagaaggtgctttagtctgaagatggcggcctcagcagcgagaggtgctgcggcgctgcgtagaagtatcaatcagccggttgcttttgtgagaagaattccttggactgcggcgtcgagtcagctgaaagaacactttgcacagttcggccatg

SEQ ID NO: 426 - DNA, 174 bp, synthetic construct
  misc_feature 1..174: note = Description of Artificial Sequence: Synthetic polynucleotide
  source 1..174: mol_type = other DNA
gggggaggggcggtcctaggaggagcaggagcctggtgctttctatcagggagggatcacaccggctcactgctgagccggccaggcagacacaggcttgggctctgctgggcatcatacttgtcactgggtaaacagtttgcccacttaccgcaggatgaagctgcttgccag

SEQ ID NO: 427 - DNA, 174 bp, synthetic construct
  misc_feature 1..174: note = Description of Artificial Sequence: Synthetic polynucleotide
  source 1..174: mol_type = other DNA
ggggggccatagttctccctgattgagacttgcctgctgctgtgaccactggtcttgtcctcttctccagcatggtgtgtctgaagctccctggaggctcctgtatggcagcgctgacagtgacattgacggtgctgagctccccactggctttggctggggacacccaaccac

SEQ ID NO: 428 - DNA, 174 bp, synthetic construct
  misc_feature 1..174: note = Description of Artificial Sequence: Synthetic polynucleotide
  source 1..174: mol_type = other DNA
ggggggcttgtgggtcctcctccccctcccactgacaactgccccaactgctcttcccgccccggtcacagtgaaaatgtagacggggtcgttgtccactatgttaggtcttaatggtgggaggacgcccgagtgctcggcccgtttcaccccgaggaggaaggacactgggtc

SEQ ID NO: 429 - DNA, 174 bp, synthetic construct
  misc_feature 1..174: note = Description of Artificial Sequence: Synthetic polynucleotide
  source 1..174: mol_type = other DNA
ggggtctcaagtaggaggcctccccatcacccccaccccagccccccaccacccccggcctaagcagctaccatggcccaggtggccggcgcggcgttgtcccaggcgggttggtatctttcagatgaaggcattgaagcttgcacaagctctccagacaaagtcaatgtaaat

SEQ ID NO: 430 - DNA, 174 bp, synthetic construct
  misc_feature 1..174: note = Description of Artificial Sequence: Synthetic polynucleotide
  source 1..174: mol_type = other DNA
gggtacaaatgtattttggatcaaagaaactccagtattcaaagataggaactgacaggattttaggtcactttgtaggtcaccacctagaggggaggaagacctcgctttggagagtgggaataaaacgctcgtggaaaagggtacacgcttttctgggaaagtgaggccacc

SEQ ID NO: 431 - DNA, 174 bp, synthetic construct
  misc_feature 1..174: note = Description of Artificial Sequence: Synthetic polynucleotide
  source 1..174: mol_type = other DNA
ggtatgagagcttccagggagacccgccaagatctccaggcaggccgggccaggctctctgggattccggactggcttcgcccaactggaaccccctcgatgagggggccccaggcagaccttatatgagcatcccagccatcactcttccacctgctccttagagaagggaag

SEQ ID NO: 432 - DNA, 174 bp, synthetic construct
  misc_feature 1..174: note = Description of Artificial Sequence: Synthetic polynucleotide
  source 1..174: mol_type = other DNA
ggtcgcggctgtggccgggggaagtgaatggttttacccagagggccctgcgccgcctttctccgctggcaacggcgccgctccccgctcctcctccccagccatggcgttcacgttcgcggccttctgctacatgctggcgctgctgctcactgccgcgctcatcttcttcgc

SEQ ID NO: 433 - DNA, 174 bp, synthetic construct
  misc_feature 1..174: note = Description of Artificial Sequence: Synthetic polynucleotide
  source 1..174: mol_type = other DNA
ggtctcagggttgaagagggggaggcctcagacttctcgctggcctgggattcctccgtgacagcagcaggaggcctagaaggagagccagagtgcgatcagaaaaccagccgtgcgctggaagacaggaacagcgtgacaagtcaagaggagagaaatgaggatgatgaagac

SEQ ID NO: 434 - DNA, 174 bp, synthetic construct
  misc_feature 1..174: note = Description of Artificial Sequence: Synthetic polynucleotide
  source 1..174: mol_type = other DNA
ggtgagtggcccctgctggaccgtggatcccgggcgggcgtgcgggcggcagcgtacgaggccttctactcgcccgggtgtccggtgcctcgcttctccctgggaccctgtcgtcaacatcgaggcctgccagtgagcttctaccatcatggacctattgttcgggcgccggaa

SEQ ID NO: 435 - DNA, 174 bp, synthetic construct
  misc_feature 1..174: note = Description of Artificial Sequence: Synthetic polynucleotide
  source 1..174: mol_type = other DNA
ggttctagctgatcatgtgacaatccaagatggcggtgcccggcgaggcggaggaggaggcgacagtttacctggtagtgagcggtatcccctccgtgttgcgctcggcccatttacggagctattttagccagttccgagaagagcgcggcggtggcttcctctgtttccact

SEQ ID NO: 436 - DNA, 174 bp, synthetic construct
  misc_feature 1..174: note = Description of Artificial Sequence: Synthetic polynucleotide
  source 1..174: mol_type = other DNA
ggttgacccaactgctgctctagaaacttctcctcccgctcctttgggggctacctgtactacccaggctcctaccccagcagcctggtctacagcactgccctctgctctcccagcacctgccagctgcgttcctctctctacagggactgtcagaagacctgctgggagccc

SEQ ID NO: 437 - DNA, 174 bp, synthetic construct
  misc_feature 1..174: note = Description of Artificial Sequence: Synthetic polynucleotide
  source 1..174: mol_type = other DNA
ggtttcattgtgttggccaggctggtctcgaactcctgacctcgtgatccgcccgccttggcctcccaaagtgctaggattacaagtgtgagccaccgcgtccggcctttcaaatggtatttttgattttcctcttccagtccttaaagcagctgatttagaagaatacaaatc

SEQ ID NO: 438 - DNA, 174 bp, synthetic construct
  misc_feature 1..174: note = Description of Artificial Sequence: Synthetic polynucleotide
  source 1..174: mol_type = other DNA
ggtttgtaggagtcctgaagtgagaaaggttctgatgtaggctctttctgggtgccagcattattaaagtattgtttatagttttcacttttccttcccaacactggagcaacattcaaaagcccattccccaggaaaaccctccctttcctttgcccacagttccaagatgag

SEQ ID NO: 439 - DNA, 174 bp, synthetic construct
  misc_feature 1..174: note = Description of Artificial Sequence: Synthetic polynucleotide
  source 1..174: mol_type = other DNA
gtacttcatagactttatcatacttcgtagcatccagtatgttttctttgctaagattattgattttgtattgaagggtcccatgtccatcgttttcaatgctttatctccagggttggagcatgcctgctgtggcagaggtaaaacttcgagatgatcaatatacactggaac

SEQ ID NO: 440 - DNA, 174 bp, synthetic construct
  misc_feature 1..174: note = Description of Artificial Sequence: Synthetic polynucleotide
  source 1..174: mol_type = other DNA
gtagaggcggaagttgaggggactgacgcagatgggggaattttgcctcgatggcactttcctgtccgcgactccgcccccaccagaggggctaggctctgggattcaagatggaggcgctgagtcgagctgggcaggagatgagcctagcggccctgaagcaacacgacccct

SEQ ID NO: 441 - DNA, 174 bp, synthetic construct
  misc_feature 1..174: note = Description of Artificial Sequence: Synthetic polynucleotide
  source 1..174: mol_type = other DNA
gtagcgcggtccccatacggctgtaatcagtgaattagaaaaaaaacaccctagcagcgatattctatgatagattttttttcctctgcgctcgcctttttcctaggccttgcccccccaaagcccctccaaaagagggaactttttctctgagggggctccaaggagaaggcc

SEQ ID NO: 442 - DNA, 174 bp, synthetic construct
  misc_feature 1..174: note = Description of Artificial Sequence: Synthetic polynucleotide
  source 1..174: mol_type = other DNA
gtagttcttctcgatcgtgtcagtttgtaaggcgagggcggaagttggattcctggcctgagaatattaggcgtagttttccagtttttggcaaagcggaaatacttaaggcccctgggttgactgggttctttgttttatctaccggcttctgctttacgacaggtcacaaac

SEQ ID NO: 443 - DNA, 174 bp, synthetic construct
  misc_feature 1..174: note = Description of Artificial Sequence: Synthetic polynucleotide
  source 1..174: mol_type = other DNA
gtatgaggatggtagaagctctcgtcgaaccagatggatgaagaccactaacggcttttgtttcctctggtaacagcaagagacagagcgacatgagagattggaccgcgggctgcactggagaatttactggtaggataattcatccctaaagagattgaagtgagcttcaga

SEQ ID NO: 444 - DNA, 174 bp, synthetic construct
  misc_feature 1..174: note = Description of Artificial Sequence: Synthetic polynucleotide
  source 1..174: mol_type = other DNA
gtattgatgtcaagctgaaccatcgtaggaagttgaaagccttagaaagaggacttggtaaagtttttggattatcttgaaactctggcaagatggccaagtatggagaacatgaagccagtcctgacaatgggcagaacgaattcagtgatatcattaagtccagatctgatg

SEQ ID NO: 445 - DNA, 174 bp, synthetic construct
  misc_feature 1..174: note = Description of Artificial Sequence: Synthetic polynucleotide
  source 1..174: mol_type = other DNA
gtcaactacagctgttctccttcttttcccagtatcctttgggtgcagtgagacaccaggagagctgctgctttgggggatggacaggggcagcaggaatgcctttgtgttttcgcagtgaacctccttggcctgggcgaagctgtgtggaccaagcaagtcaggagtgtggcc

SEQ ID NO: 446 - DNA, 174 bp, synthetic construct
  misc_feature 1..174: note = Description of Artificial Sequence: Synthetic polynucleotide
  source 1..174: mol_type = other DNA
gtccttcccacccttagtcccaggcatctgactaccgggaacctcagccagagtccgggagccccccaccccgtccaggagccaacagagcccccgtcttgctggcgtgagaatacattgctctcctttggttgaatcagctgtccctcttcgtgggaaaatgaaccagaagac

SEQ ID NO: 447 - DNA, 174 bp, synthetic construct
  misc_feature 1..174: note = Description of Artificial Sequence: Synthetic polynucleotide
  source 1..174: mol_type = other DNA
gtctcccggggattttgtatatattttttaacttccgtcagggctcccgcttcatatttccttttctttccctctctgttcctgcacccaagttctctctgtgtccccctcgcgggccccgcacctcgcgtcccggatcgctctgattccgcgactccttggccgccgctgcgc

SEQ ID NO: 448 - DNA, 174 bp, synthetic construct
  misc_feature 1..174: note = Description of Artificial Sequence: Synthetic polynucleotide
  source 1..174: mol_type = other DNA
gtctgacttgagtccctgctgctgcagtgcacgccccttcggcagccagggtggggcccagacccaacctggcccctcctgcccccaccccgcctttgggtcgctgacccccaggctgtggtgagggtctgagagctggtaccacggagcctgggcaacctcctccgcccaccc

SEQ ID NO: 449 - DNA, 174 bp, synthetic construct
  misc_feature 1..174: note = Description of Artificial Sequence: Synthetic polynucleotide
  source 1..174: mol_type = other DNA
gtctgcgtcagttggtcacgtggttgttcggagcgggcgagcggagttagcagggctttactgcagagcgcgccgggcactccagcgaccgtggggatcagcgtagtcttctgtgcttcaccatctacataatgaatcccagtatgaagcagaaacaagaagaaatcaaagaga

SEQ ID NO: 450 - DNA, 174 bp, synthetic construct
  misc_feature 1..174: note = Description of Artificial Sequence: Synthetic polynucleotide
  source 1..174: mol_type = other DNA
gtctggagccggtgctctgcggcggggcgggagggctcgcatccccatagtgctgggttacagtgaaggtacgccccgcgctctgctctggagaggcagggtgggatagggaacgtctcgagtggcgcccgcagtcatggtggtgttcgttggccgccgcctcccggcgctcct

SEQ ID NO: 451 - DNA, 174 bp, synthetic construct
  misc_feature 1..174: note = Description of Artificial Sequence: Synthetic polynucleotide
  source 1..174: mol_type = other DNA
gtctggcagctattttgctttaaccgatgacagaccgtggcaaggaggtgtacagccctgactttcatagcctcggaggagaaggtcttggtggccgacaagtctggagacgtctactccttttcggtgctggagccacacgggtgtggccgtctagagctggggcacctgtct

SEQ ID NO: 452 - DNA, 174 bp, synthetic construct
  misc_feature 1..174: note = Description of Artificial Sequence: Synthetic polynucleotide
  source 1..174: mol_type = other DNA
gtctttaaagggcaattgtcgacactctgcaaacataccgatttgttgtctgcccactttggagtcttcaatctgggcagtaactatttaccctttttcctgctagcctgtccccctctctggattgaagtcacctgctaagacaatggactaccgaccagactcccggaaatc

SEQ ID NO: 453 - DNA, 174 bp, synthetic construct
  misc_feature 1..174: note = Description of Artificial Sequence: Synthetic polynucleotide
  source 1..174: mol_type = other DNA
gtgatgctcggactagagcccaggcatttttaactcctgttccctcaccagcctgcaggaaatggaaaaggagtaaaagtccctcgcaatttccgactgttggaagaactcgaagaaggccagaaaggagtaggagatggcacagttagctggggtctagaagatgacgaagac

SEQ ID NO: 454 - DNA, 174 bp, synthetic construct
  misc_feature 1..174: note = Description of Artificial Sequence: Synthetic polynucleotide
  source 1..174: mol_type = other DNA
gtgcagaactgccagtcccctgacacgctgtgccccacccactgcagcccagtgctgaatgaaccctgcccagaggtgtctgtagtgagcttctgccctagtgacttttgagccggccaggttgcagcgcggacacactcgcaggtcgctgtggccccagcctcgcctgacaga

SEQ ID NO: 455 - DNA, 174 bp, synthetic construct
  misc_feature 1..174: note = Description of Artificial Sequence: Synthetic polynucleotide
  source 1..174: mol_type = other DNA
gtgcctggaaaggaattgttttggcctaggatcatccagctagacttcgggctccttgaggatattcagttttgtatgtttgaatatcctctcaccatgttcagcataaagtaccattcttaatgattatcctcaacaagacaggtgtgagagggttgctgttgtattgcaatc

SEQ ID NO: 456 - DNA, 174 bp, synthetic construct
  misc_feature 1..174: note = Description of Artificial Sequence: Synthetic polynucleotide
  source 1..174: mol_type = other DNA
gtgctgccctaggctgcatgagtcgaagcaagcgtgtttccttcccgccaggcaagtgcccttagaaaccgggccccgcccccttcctggcctgcattcccatcccctctcccggggcggaggtgaggacctccttggttcctttggttctgtcagtgagccccttccttggcc

SEQ ID NO: 457 - DNA, 174 bp, synthetic construct
  misc_feature 1..174: note = Description of Artificial Sequence: Synthetic polynucleotide
  source 1..174: mol_type = other DNA
gtgcttattaacttttctctcagtccctcactctgctgctcttctcgcctcatctcacataagggaaaactcaggctccaaaagcaaagtgattccaccaagatgacaatggaatcgggacctggtgtccaagcctggtcctcgcacgaggtagatactccctgagatgctggg

SEQ ID NO: 458 - DNA, 174 bp, synthetic construct
  misc_feature 1..174: note = Description of Artificial Sequence: Synthetic polynucleotide
  source 1..174: mol_type = other DNA
gtggaacctcataaaatctccaagaaacatcattcacccatactgactagtttcacatctctttgtttgaagaaaacaggtctgaaacaaggtcttacccccagctgcttctgaacacagtgactgccagatctccaaacatcaagtccagctttgtccgccaacctgtctgac

SEQ ID NO: 459 - DNA, 174 bp, synthetic construct
  misc_feature 1..174: note = Description of Artificial Sequence: Synthetic polynucleotide
  source 1..174: mol_type = other DNA
gtgggagagccgggctggagtcacagtttttattttgctagggaggtagtcagtggcgcacaaagggtaacaagcagtgatagtggggatgctttccattttaggaaacttttcctaaaaggaagtggcaattttaactaatctcccctccgccgctcccagctgccgctccag

SEQ ID NO: 460 - DNA, 174 bp, synthetic construct
  misc_feature 1..174: note = Description of Artificial Sequence: Synthetic polynucleotide
  source 1..174: mol_type = other DNA
gtgggggaaagtatggctgcgatgatggcatttcttaggacacctttggattaataatgaaaacaactactctctgagcagctgttcgaatcatctgatatttatactgaatgagttactgtaagtacgtattgacagaattacactgtactttcctctaggtgatctgtgaaa

SEQ ID NO: 461 - DNA, 174 bp, synthetic construct
  misc_feature 1..174: note = Description of Artificial Sequence: Synthetic polynucleotide
  source 1..174: mol_type = other DNA
gtggttctctctaacaatgctgctcaagcctgttttaaagttaatgtcagtaatttgatttgattgttccttccaggtgtctcaaaggctgttgagcacatcaataaaactattgcgcctgccctggttagcaagaaactgaacgtcacagaacaagagaagattgacaaactg

SEQ ID NO: 462 - DNA, 174 bp, synthetic construct
  misc_feature 1..174: note = Description of Artificial Sequence: Synthetic polynucleotide
  source 1..174: mol_type = other DNA
gtgtgtggaggggaccctgtggttagcagcagctatcgcagcgtcggatgttcagagcagcagaagccggcgtcgtcggatgttgtgttgcccgccaccatgagctacacaggctttgtccagggatctgaaaccactttgcagtcgacatactcggataccagcgctcagccc

SEQ ID NO: 463 - DNA, 174 bp, synthetic construct
  misc_feature 1..174: note = Description of Artificial Sequence: Synthetic polynucleotide
  source 1..174: mol_type = other DNA
gttaaaccaacaagccgatagaaaaaggtagttatcaagagatttttaaaacttcaaccctttttctcttatagttagtgaagagagtagaatatctccagttttggctgacatctctacaacctgaacaattggcttaaacttcacttgggattcccggttgcttgttttagc

SEQ ID NO: 464 - DNA, 174 bp, synthetic construct
  misc_feature 1..174: note = Description of Artificial Sequence: Synthetic polynucleotide
  source 1..174: mol_type = other DNA
gttatacacgagatcagagtctaattttatcttggcaaagaaaaagagaatttgaggactgggaattttccattcagggtaatatcaacaagctggtccactgagaggagagcaagcctgttgaaattgtttttgctttcacagctttttcctgtccggggagcaggagaagcc

SEQ ID NO: 465 - DNA, 174 bp, synthetic construct
  misc_feature 1..174: note = Description of Artificial Sequence: Synthetic polynucleotide
  source 1..174: mol_type = other DNA
gttattggttggcagttcagccaatgagcgggcctgttactagtttgcggcatcctgtggtataggggaagcgctccgggcctggaatccctacgcgtccctttgggtttagcacgatgagctcaatcggcactgggtatgacctgtcagcctctacattctctcctgacggaa

SEQ ID NO: 466 - DNA, 174 bp, synthetic construct
  misc_feature 1..174: note = Description of Artificial Sequence: Synthetic polynucleotide
  source 1..174: mol_type = other DNA
gtttgagcagcattgttagagcctgtggaaaacactttacaactgtgtaactgtcttcatctttacagaggaatagtctacaaaggaagacttgtaacctggagaagagacctgtcatttactccatcctttatagtgatgctacaggacgaagaggaatggataaaaacattg

SEQ ID NO: 467 - DNA, 174 bp, synthetic construct
  misc_feature 1..174: note = Description of Artificial Sequence: Synthetic polynucleotide
  source 1..174: mol_type = other DNA
gtttggctctgtttgagcaccccgggatgattggtggtggggtgtggctgaaggtgaattggaacagtgcactcagagccaggttgcaagagtgctgcatgctcctcagggattggctccggccaagtgccccagcctccttttctggagaattctgtttttgacttgggcccc

SEQ ID NO: 468 - DNA, 174 bp, synthetic construct
  misc_feature 1..174: note = Description of Artificial Sequence: Synthetic polynucleotide
  source 1..174: mol_type = other DNA
gtttggggccagagtgggcgaggcgcggaggtctggcctataaagtagtcgcggagacggggtgctggtttgcgtcgtagtctcctgcagcgtctggggtttccgttgcagtcctcggaaccaggacctcggcgtggcctagcgagttatggcgacgaaggccgtgtgcgtgct

SEQ ID NO: 469 - DNA, 174 bp, synthetic construct
  misc_feature 1..174: note = Description of Artificial Sequence: Synthetic polynucleotide
  source 1..174: mol_type = other DNA
taaaagggttagatttcagtctatagacgatcagtgggaaggcctttcctaggaggtaaccagaacagagagctgtaaactccgtgaatgcaagaggctgcttctgttacctgagtggttctcactcatctttgccttccttacctcgtgatctcaccattccagattgaaatc

SEQ ID NO: 470 - DNA, 174 bp, synthetic construct
  misc_feature 1..174: note = Description of Artificial Sequence: Synthetic polynucleotide
  source 1..174: mol_type = other DNA
taactgacgctaccgtcgcggccgccggcaagttcctttactgtgttttcttggttcagccttgaagtgagtcgtggacgatcctctctcagcgtccagcctagacggcggtgttgctccggcagcgttcctgggagccgagggccagagactaagttgtgggacgacttcagc

SEQ ID NO: 471 - DNA, 174 bp, synthetic construct
  misc_feature 1..174: note = Description of Artificial Sequence: Synthetic polynucleotide
  source 1..174: mol_type = other DNA
taaggcggcgtttctgggcgcagccgtgtcgctcctggtttccatcgtgtgggaagaacggagtaacgagtctcacgcagaaaaaggtcttgagagcaccttgtggcgcacccagtgtaactgtgacgatcaaccatttttgtgttgtcctcccccacctgccagaagccaacc

SEQ ID NO: 472 - DNA, 174 bp, synthetic construct
  misc_feature 1..174: note = Description of Artificial Sequence: Synthetic polynucleotide
  source 1..174: mol_type = other DNA
tacaggacttgacccaatgaaagaagcatatggcacttgtgaagataaatgttactcctccctttttaattggaacttctgcttaggacctgtgtatgacgtttcacctgtgatctgttctttcggtagccactgactttgagttacaggaaggtctccgaagatttgtgtcaa

SEQ ID NO: 473 - DNA, 174 bp, synthetic construct
  misc_feature 1..174: note = Description of Artificial Sequence: Synthetic polynucleotide
  source 1..174: mol_type = other DNA
tacatcttttagtgcgtatgttctgtccacccagctactggttcatttgagtagatcggagtcagatgagtacatgtttacgggaggcgcttggttacgggatccagataggaatctttatctgagctgcttgtcagtttgttcgtctgtccctaggtctgtctgctatcagct

SEQ ID NO: 474 - DNA, 174 bp, synthetic construct
  misc_feature 1..174: note = Description of Artificial Sequence: Synthetic polynucleotide
  source 1..174: mol_type = other DNA
tactaccacctcctttgcgggtaaacagacatggccggcgaaggagatcagcaggacgctgcgcacaacatgggcaaccacctgccgctcctgcctgagagtgaggaagaagatgaaatggaagttgaagaccaggatagtaaagaagccaaaaaaccaaacatcataaatttt

SEQ ID NO: 475 - DNA, 174 bp, synthetic construct
  misc_feature 1..174: note = Description of Artificial Sequence: Synthetic polynucleotide
  source 1..174: mol_type = other DNA
tagacggaacttcgcctttctctcggccttagcgccatttttttgggtgagtgttttttggttcctgcgttgggattccgtgtacaatccatagacatctgacctcggcacttagcatcatcacagcaaactaactgtagcctttctctctttccctgtagaaacctctgcgcc

SEQ ID NO: 476 - DNA, 174 bp, synthetic construct
  misc_feature 1..174: note = Description of Artificial Sequence: Synthetic polynucleotide
  source 1..174: mol_type = other DNA
tagacttgaatatgcctctgggcaaagaagcagagctaacgaggaaagggatttaaagagtttttcttgggtgtttgtcaaacttttattccctgtctgtgtgcagaggggattcaacttcaatttttctgcagtggctctgggtccagccccttacttaaagatctggaaagc

SEQ ID NO: 477 - DNA, 174 bp, synthetic construct
  misc_feature 1..174: note = Description of Artificial Sequence: Synthetic polynucleotide
  source 1..174: mol_type = other DNA
taggctagggtcattacatagataatttgcctgctgtgtaaataaaaatgaaattgtttaaattttgtgcaagagaaagtgaaaataaggagttacgatttgtttgttagagaaagtggaggccattggaatgacagtttttggaagtgtggagcagtttggctaagaatagga

SEQ ID NO: 478 - DNA, 174 bp, synthetic construct
  misc_feature 1..174: note = Description of Artificial Sequence: Synthetic polynucleotide
  source 1..174: mol_type = other DNA
tatagcaagcaagaagtggcagggcgcgcaccggctgtcgccaagtgctgttcaactcagggagccggggcttcgctccgtccctcccccggcttccagagctttttggggttggagggtgggaggccaggggcgttctcacagctgtgtgtcctctttcccatcctgcgcaga

SEQ ID NO: 479 - DNA, 174 bp, synthetic construct
  misc_feature 1..174: note = Description of Artificial Sequence: Synthetic polynucleotide
  source 1..174: mol_type = other DNA
tatatgatagttcgtttatttcacatctttgacagcatttagtgttgtcagggttttttttgtttgttttagacattttagtagtctggctcttgctgattgaattcctttggtgcagtttagcatgttcctctgtgttctgcatctcctgtagtgtaatgttcaagctcagaa

SEQ ID NO: 480 - DNA, 174 bp, synthetic construct
  misc_feature 1..174: note = Description of Artificial Sequence: Synthetic polynucleotide
  source 1..174: mol_type = other DNA
tcaaaggaagaggccccttaatatcctggaataatgggacccatccccgtaatcagtgaatctcatccacccgcttgccagcttctacccgcagcaagtagaagctaagtcctggctcaaatctcttccctccctccctctcccagctgtcagtgcttttggacttgtgctcag

SEQ ID NO: 481 - DNA, 174 bp, synthetic construct
  misc_feature 1..174: note = Description of Artificial Sequence: Synthetic polynucleotide
  source 1..174: mol_type = other DNA
tcaatcgccttttatctctggccctgggacctttgcctattttctgattgataggctttgttttgtctttacctccttctttctggggaaaacttcagttttatcgcacgttccccttttccatatcttcatcttccctctacccagattgtgaagatggaaagggtccaaccc

SEQ ID NO: 482 - DNA, 174 bp, synthetic construct
  misc_feature 1..174: note = Description of Artificial Sequence: Synthetic polynucleotide
  source 1..174: mol_type = other DNA
tcacacctgccaagcatcacacctgcgatgcctgcacgagctgggtggggtccgcgcagctgcagtaagggggcgacccggcgtctgttagtcggcggttcatctccttcgtgcctcgatgagctttaacgccattttcctccattctctttcttcacctcttgagtttccaag

SEQ ID NO: 483 - DNA, 174 bp, synthetic construct
  misc_feature 1..174: note = Description of Artificial Sequence: Synthetic polynucleotide
  source 1..174: mol_type = other DNA
tcaccacggcggcagccctttaaacccctcacccagccagcgccccatcctgtctgtccgaacccagacacaagtcttcactccttcctgcgagccctgaggaagccttctttccccagacatggccaacaagggtccttcctatggcatgagccgcgaagtgcagtccaaaat

SEQ ID NO: 484 - DNA, 174 bp, synthetic construct
  misc_feature 1..174: note = Description of Artificial Sequence: Synthetic polynucleotide
  source 1..174: mol_type = other DNA
tcaccgaggtagagagaaaagggcagtagccctagagactattgcgacacagtgtgcccctcataagtttttccagggaggggttctgtactgagttgacgccccaggagctgagcaccaggctttgcatccttgggaactcagcaaacgtttgttcagccaattgcaggtagc

SEQ ID NO: 485 - DNA, 174 bp, synthetic construct
  misc_feature 1..174: note = Description of Artificial Sequence: Synthetic polynucleotide
  source 1..174: mol_type = other DNA
tcactcactcacacacctcccccagctcacctcctccccactccagcatggccgcctccaccatgtccatctgctccagcgcctgcaccaactcctggcaggtggacgactgcccagagagctgctgtgagctcccctgcggcacccccagctgctgtgccccagccccctgcc

SEQ ID NO: 486 - DNA, 174 bp, synthetic construct
  misc_feature 1..174: note = Description of Artificial Sequence: Synthetic polynucleotide
  source 1..174: mol_type = other DNA
tcactgttcagcctcggggcccaggcgcttcctggaatctctccttggccggggttaaaatgcagttcccgctcaaaatgcttataggttgatagaagtccagatcctgaggaaatctccagctaaatgctcaaaatataaaatactgagctgagatttgcgaagagcagcagc

SEQ ID NO: 487 - DNA, 174 bp, synthetic construct
  misc_feature 1..174: note = Description of Artificial Sequence: Synthetic polynucleotide
  source 1..174: mol_type = other DNA
tcagatggtcactagaggctgctgcttaccagcggctctgctgggcccagacaaccacccagcaaaccaaactcaaccctggatgaatctgtggcccaaacacgcagtggatcccacagtcggtgctaacagttctctctctacctagtggacgagcgccttcccctggtgccg

SEQ ID NO: 488 - DNA, 174 bp, synthetic construct
  misc_feature 1..174: note = Description of Artificial Sequence: Synthetic polynucleotide
  source 1..174: mol_type = other DNA
tcagcatacgtttatgaagattacccccacagctgtgtggcaagtgatcaaaaaggaacaggaccagagaagagcaggaaaactggtcagaaagcaggcgccctaaccctggattgccccctgtgggtcactttctcagtcattttgagctcagcctaatcaaagactgaggtt

SEQ ID NO: 489 - DNA, 174 bp, synthetic construct
  misc_feature 1..174: note = Description of Artificial Sequence: Synthetic polynucleotide
  source 1..174: mol_type = other DNA
tcatagtgggactatattcattcctccaaagttacagctgctctaaatctttcatcatcaaccaaggtggatctcaagagtggcctcgaagaatgtgctgtggcattgaacttatttctaagcaacaaatttacagacgccttagaattgcttcgcccctgggctaaggagagt

SEQ ID NO: 490 - DNA, 174 bp, synthetic construct
  misc_feature 1..174: note = Description of Artificial Sequence: Synthetic polynucleotide
  source 1..174: mol_type = other DNA
tccagaggacgccacaccccacatttgaatatttttttttcttgtcacgcaaacttcctgggcaggaactccaagggctcaatggacgggaagcagggtccttaaatacgtcccctcttggctcttgccgttccaggagccccagttaccgggagaggctgtgtcaaaggcgcc

SEQ ID NO: 491 - DNA, 174 bp, synthetic construct
  misc_feature 1..174: note = Description of Artificial Sequence: Synthetic polynucleotide
  source 1..174: mol_type = other DNA
tccaggttcacacaactggaacccatctccaggaacaaacagctggaacccatctcccgttgaagggaaactgccagatttttgtaagattcttcctcctgggcacctctaagatactgatggctctgcagaggacccattcattgcttctgcttttgctgctgaccctgctgg

SEQ ID NO: 492 - DNA, 174 bp, synthetic construct
  misc_feature 1..174: note = Description of Artificial Sequence: Synthetic polynucleotide
  source 1..174: mol_type = other DNA
tcccaaccggcttccccgccccatttggtgggggctggcccttggccctccaactcctttaccctacatgcctgagaagccagggaccaagatggatcttctcctcgacatcagctaagcctggaggactcttcccctcagagaccatggagagggacagccacgggaatgcat

SEQ ID NO: 493 - DNA, 174 bp, synthetic construct
  misc_feature 1..174: note = Description of Artificial Sequence: Synthetic polynucleotide
  source 1..174: mol_type = other DNA
tcccacccccagcctggggcctctgggagccttggtcctgagcagccaacacaccagcccagacagctgcaagtcaccatggacgctgaaggcctggcgctgctgctgccgcccgtcaccctggcagccctggtggacagctggctccgagaggactgcccagggctcaactac

SEQ ID NO: 494 - DNA, 174 bp, synthetic construct
  misc_feature 1..174: note = Description of Artificial Sequence: Synthetic polynucleotide
  source 1..174: mol_type = other DNA
tcccagacccggggctctccaaggccccgcgcttccgagctccgcgcaaactctggcttctcttgtacgacagaggtggtttgctcttccgttgccccgtggcttcagctcatctttggcaggaaggcgaggcttccgcccggcacaggggatgtccagctcgccgctgtccaa

SEQ ID NO: 495 - DNA, 174 bp, synthetic construct
  misc_feature 1..174: note = Description of Artificial Sequence: Synthetic polynucleotide
  source 1..174: mol_type = other DNA
tcccggggctacgaggcggaagcgaaggcagacgcagtctccgtcgttgacgttagtcgcagtcttcgctgctaacgttttgttatgagttgctaaaatggtgaaatgctgctccgccattggatgtgcttctcgctgcttgccaaattcgaagttaaaaggactgacatttca

SEQ ID NO: 496 - DNA, 174 bp, synthetic construct
  misc_feature 1..174: note = Description of Artificial Sequence: Synthetic polynucleotide
  source 1..174: mol_type = other DNA
tccctggctcgcctcgcgcctgccggcggatccgtggtcatgccaacccagcagccggctgcgccgagtactcgtgcccccaaaccctcccggagtctctctggctcactttgtgccctgttttctgatgcagactcgggatccgggatgaaggcggagcttccccctgggcct

SEQ ID NO: 497 - DNA, 174 bp, synthetic construct
  misc_feature 1..174: note = Description of Artificial Sequence: Synthetic polynucleotide
  source 1..174: mol_type = other DNA
tccgacggggctggcccggtttcctggcgacgcggccctgcaggcggttgcgttccccgtcgttaccctctttctcttcccgacgcgtgagttaggccgtaatgccttggctgctctcagcccccaagctggttcccgctgtagcaaacgtccgcggcctctcagggtcttact

SEQ ID NO: 498 - DNA, 174 bp, synthetic construct
  misc_feature 1..174: note = Description of Artificial Sequence: Synthetic polynucleotide
  source 1..174: mol_type = other DNA
tccgcccgcctcggcctcccaaagtgctgggattacaggcgtgagccaccgtgcccggccgggaggtcactttaaggagggctgtccaactgcaaggagccgcaagcaggaagtgaaaccacagcacttcaaaaaaagagggagactgggacaagcgtatctaagaggctgaac

SEQ ID NO: 499 - DNA, 174 bp, synthetic construct
  misc_feature 1..174: note = Description of Artificial Sequence: Synthetic polynucleotide
  source 1..174: mol_type = other DNA
tccgcttcggtttctgttgcgggacccggggtgtctcctagcgcaaccggaactagccttctgggggccggcttcctttatctctggcggccttgtagtcgtctccgagactccccacccctccttccctcttgaccccctaggtttgattgccctttccccgaaacaactatc

SEQ ID NO: 500 - DNA, 174 bp, synthetic construct
  misc_feature 1..174: note = Description of Artificial Sequence: Synthetic polynucleotide
  source 1..174: mol_type = other DNA
tccggatgagaggctaagccataatagaaagaatggagaattattgattgaccgtctttattctgtgggctctgattctccaatgggaataccaagggatattatttttacagatggttttccatactggaacccaaaggtaaagacactcaaggacagacatttttggcagag

SEQ ID NO: 501 - DNA, 174 bp, synthetic construct
  misc_feature 1..174: note = Description of Artificial Sequence: Synthetic polynucleotide
  source 1..174: mol_type = other DNA
tccggccacggtgatgacgagtctccgtcaacctcgtctggcacagctgggacctcctctgtgccagagctacctgggttttactttgaccctgaaaagaaacgctacttccgcttgctccctggacataacaactgcaaccccctgacgaaagagagcatccggcagaaggag

SEQ ID NO: 502 - DNA, 174 bp, synthetic construct
  misc_feature 1..174: note = Description of Artificial Sequence: Synthetic polynucleotide
  source 1..174: mol_type = other DNA
tcgcagactcctaagtggtctggaacctaacctgcagtgtctctgagcttctggcaagtatgaggcaaggatttcacagaagaacttggagcaaaaattcccactgtcatagctataggctgtccagtcttgagggagctgcaggaacaggaaaaagagaccttcagagaagac

SEQ ID NO: 503 - DNA, 174 bp, synthetic construct
  misc_feature 1..174: note = Description of Artificial Sequence: Synthetic polynucleotide
  source 1..174: mol_type = other DNA
tctccttacgtcacttcctctccagcccctgcgtaatcgataaggaaacccggacgctgctgcccctttctttttttcaggcggccgggaagatggcggacattcagactgagcgtgcctaccaaaagcagccgaccatctttcaaaacaagaagagggtcctgctgggagaaa

SEQ ID NO: 504 - DNA, 174 bp, synthetic construct
  misc_feature 1..174: note = Description of Artificial Sequence: Synthetic polynucleotide
  source 1..174: mol_type = other DNA
tctcgtttcaggtcaccatcagaaaagctaagtttgctgtatagtgaggatcaggagatctgatcctgattgcagaaccttccctgattacagaatcttgggattgttgagaggattacatgtaaagtaccaggacagtgcatggcacattggttggaataaaaacagggttga

SEQ ID NO: 505 - DNA, 174 bp, synthetic construct
  misc_feature 1..174: note = Description of Artificial Sequence: Synthetic polynucleotide
  source 1..174: mol_type = other DNA
tctgaaactatcttgttgttgatgcaggctattttcttgaccccttcatgggactcccaacaggggtaccccatttactcagcctgccctgctcaacctcttgcaggagggagcacacgagtgaacgagtgcaggaaccagctggctgctttagtgctgtgaggagtaaactcc

SEQ ID NO: 506 - DNA, 174 bp, synthetic construct
  misc_feature 1..174: note = Description of Artificial Sequence: Synthetic polynucleotide
  source 1..174: mol_type = other DNA
tctgaaatgggagtttaagacctacaatcagacaagggcagggagctgtcttgacccccagtggaggctgacaatttttttcctgtgtacactggacccctttcatagaggtgggtgctatgcaagtggagctggtgactgatggctgaccattgatacaggctaggaatacca

SEQ ID NO: 507 - DNA, 174 bp, synthetic construct
  misc_feature 1..174: note = Description of Artificial Sequence: Synthetic polynucleotide
  source 1..174: mol_type = other DNA
tctgccggcgcctgtccggacccgggcccctctccgctttcggccggcctcgggcaccgggcttctggagctcccggagccctgcctgttccctgtccatccaggccagcagctgaaggagcctcacctgcctcccttctctgagtagcacggatttgaggagaagcagcgaag

SEQ ID NO: 508 - DNA, 174 bp, synthetic construct
  misc_feature 1..174: note = Description of Artificial Sequence: Synthetic polynucleotide
  source 1..174: mol_type = other DNA
tctgcgcttccccatggggctggcctgcggcgcctgggcgctctgagattgtcactgctgttccaagggcacacgcagagggatttggaattcctggagagttgcctttgtgagaagctggaaatatttctttcaattccatctcttagttttccataggaacatcaagaaatc

SEQ ID NO: 509 - DNA, 174 bp, synthetic construct
  misc_feature 1..174: note = Description of Artificial Sequence: Synthetic polynucleotide
  source 1..174: mol_type = other DNA
tctggatacttttaggaaaagaaccttgttattatgtactaaagtgaataatttgtgctcttagagtaggagttggaactataggacttgaaggcaagagcaggtatcttatcaaggatctactcactcagtttccctaaagctctctctccagatcggattcaaccgcacatc

SEQ ID NO: 510 - DNA, 174 bp, synthetic construct
  misc_feature 1..174: note = Description of Artificial Sequence: Synthetic polynucleotide
  source 1..174: mol_type = other DNA
tctgggaattccgggcgtttcggctccttggtcgcagaggcaggaggcgtgcgtggcaggagggttcgggttatatactcctaggtcctgggacagaatagttacgacctctgggacaggaactcttctctcttttgttaataaacttccaactccctcctcagacccgaccgc

SEQ ID NO: 511 - DNA, 174 bp, synthetic construct
  misc_feature 1..174: note = Description of Artificial Sequence: Synthetic polynucleotide
  source 1..174: mol_type = other DNA
tcttgaaagcgccacaagcagcagctgctgagccatggctgaaggggaaatcaccaccttcacagccctgaccgagaagtttaatctgcctccagggaattacaagaagcccaaactcctctactgtagcaacgggggccacttcctgaggatccttccggatggcacagtgga

SEQ ID NO: 512 - DNA, 174 bp, synthetic construct
  misc_feature 1..174: note = Description of Artificial Sequence: Synthetic polynucleotide
  source 1..174: mol_type = other DNA
tctttcataggaagaaatcactgagaaaatgagcatcatttctcaaggtttttattttcactgatctacaagtgatgctgctgtaattgtagctgcagtttttaccgatcattcaccactcagcagctggtagagaagtaagcctgcttggcaaccacctgcagggctgcagag

SEQ ID NO: 513 - DNA, 174 bp, synthetic construct
  misc_feature 1..174: note = Description of Artificial Sequence: Synthetic polynucleotide
  source 1..174: mol_type = other DNA
tctttttatggactcttttctgttggcaaaaaaaacctgttatttcttgatcttttggcaccattttcgcacttaataatggcgtaatttctcttctatttgttttctatttgcccatctgttcttttttctccttttcctgccttcttttggaccaaaaacgaaaaccaagaa

SEQ ID NO: 514 - DNA, 174 bp, synthetic construct
  misc_feature 1..174: note = Description of Artificial Sequence: Synthetic polynucleotide
  source 1..174: mol_type = other DNA
tgaactgtggttcccctgcctcccagcccggctgtgagtgctcagcgaccctgacaggctgacaggaccaggagggaggtgccgctcagattctggcaggaccgctggcgggcaggcaggggacagttgggccatatggtgctcttcccagtctggttcctgtacagtctgctc

SEQ ID NO: 515 - DNA, 174 bp, synthetic construct
  misc_feature 1..174: note = Description of Artificial Sequence: Synthetic polynucleotide
  source 1..174: mol_type = other DNA
tgacaggcatgagccaccgcgcctggccccttcttttgaatgggcctccttgcgtttccgtttcaatgccccgtgctacttttttgggagccccaaggctgtactgtttgattgactcctttttttcccctttctttttaacctaaattaaagctgccactgcagagccccgcc

SEQ ID NO: 516 - DNA, 174 bp, synthetic construct
  misc_feature 1..174: note = Description of Artificial Sequence: Synthetic polynucleotide
  source 1..174: mol_type = other DNA
tgactagaatcaggtgcttttgtttctgaagtgcttttattcttactttgacccccaggctggagtgcagtggcacgatcttggttcaccacaatctcgtctcgaaggctcaggtgattctctcacctcagccgcctgagtagctgggaccacagtttcagctgtgagttcaac

SEQ ID NO: 517 - DNA, 174 bp, synthetic construct
  misc_feature 1..174: note = Description of Artificial Sequence: Synthetic polynucleotide
  source 1..174: mol_type = other DNA
tgagattgcccggtacagcagcagttgtattctttattagcttggtagatcattttctctcgctcttttttttaatactagcaactttcatcctttgaaacgtgtgctgaaaaagaagaatcagcaaatactactgaaagtgcaatatttgagtatcactgcgagctgtttgag

SEQ ID NO: 518 - DNA, 174 bp, synthetic construct
  misc_feature 1..174: note = Description of Artificial Sequence: Synthetic polynucleotide
  source 1..174: mol_type = other DNA
tgagcgcctggagttggagacaattcctggttcagaatttaaacatctttctaggtctgcgcggggcggccattggcggcggagtgtcacgtgaccgcgggggcgtgccaatgtgcgccctcacgggtgtcaaacccctgtcagagtgtgcgatcaagatcgtgaaacaacgcg

SEQ ID NO: 519 - DNA, 174 bp, synthetic construct
  misc_feature 1..174: note = Description of Artificial Sequence: Synthetic polynucleotide
  source 1..174: mol_type = other DNA
tgataacatttcctctcaaaccttatcccttactctgcatttgggagatcatacacagagaagccttataaatgtaagagatgtggaaatatcttcagccaaaagtaaatcctcactcatcaagaaatttttactggagagaaaccttgtgaatgtgggaaagcttccattcag

SEQ ID NO: 520 - DNA, 174 bp, synthetic construct
  misc_feature 1..174: note = Description of Artificial Sequence: Synthetic polynucleotide
  source 1..174: mol_type = other DNA
tgataaccacagaatcagaacatataaaaagctctgcgggactggtgctgactgcaaccatgacaaagcttattctcctcacaggtcttgtccttatactgaatttgcagctcggaacagccagctgaaaactctcctggccattggaggctggaacttcgggactgccccgaa

SEQ ID NO: 521 - DNA, 174 bp, synthetic construct
  misc_feature 1..174: note = Description of Artificial Sequence: Synthetic polynucleotide
  source 1..174: mol_type = other DNA
tgattggtataacatctcactttccctctgcattgattttcttcttctcctcctttgcttcataaaaagagggacaagtggctggtgctgtggacagagaagctttatttttagtatgagacaacctctattttctttcaggagagggaagttggattatcaattcttttgtaa

SEQ ID NO: 522 - DNA, 174 bp, synthetic construct
  misc_feature 1..174: note = Description of Artificial Sequence: Synthetic polynucleotide
  source 1..174: mol_type = other DNA
tgcatcccttctgtccctccacccgtccccttccccaccctctggcccccaccttcttggaggcgacaacccccgggaggcattagaagggatttttcccgcaggttgcgaagggaagcaaacttggtggcaacttgcctcccggtgcgggcgtctctcccccaccgtctcaac

SEQ ID NO: 523 - DNA, 174 bp, synthetic construct
  misc_feature 1..174: note = Description of Artificial Sequence: Synthetic polynucleotide
  source 1..174: mol_type = other DNA
tgcgtgggtactggaacaagcaaacgaggcagcgagcgaaggacgggagccggaccctgggccccgtggaactccagcctgcgccaccacgtcacgcacacgctcggcgctgcgatccgcgcatataacgatatttggatttgacctgcattttggaatttatctacacttaaa

SEQ ID NO: 524 - DNA, 174 bp, synthetic construct
  misc_feature 1..174: note = Description of Artificial Sequence: Synthetic polynucleotide
  source 1..174: mol_type = other DNA
tgctaaatctcactgtcactgctaaattcagagcagatagagcctgcgcaatggaataaagtcctcaaaattgaaatgtgacattgctctcaacatctcccatctctctggatttctttttgcttcattattcctgctaaccaattcattttcagactttgtacttcagaagca

SEQ ID NO: 525 - DNA, 174 bp, synthetic construct
  misc_feature 1..174: note = Description of Artificial Sequence: Synthetic polynucleotide
  source 1..174: mol_type = other DNA
tgctacacaccactctggcttacgcttccagctaacagcggtttgtctgtgtttctggactgaagtgactgatgaaaaacagtagtcaagtctggagggtgattccctttcagttcacttgcctttcagttctggggaaattagaagatttgctctctctctctgcttcttaga

SEQ ID NO: 526 - DNA, 174 bp, synthetic construct
  misc_feature 1..174: note = Description of Artificial Sequence: Synthetic polynucleotide
  source 1..174: mol_type = other DNA
tgctcaaaacttcctgtcagtgacgcacttcccctctgctgggcgcgcggtggacggtctgaaagggagtgttcgggtttcgctggggcctcgcggctccagagcccagcatggcttcctcgcgagcctcttccacggcaaccaaaactaaagcacccgacgacttagttgctc

SEQ ID NO: 527 - DNA, 174 bp, synthetic construct
  misc_feature 1..174: note = Description of Artificial Sequence: Synthetic polynucleotide
  source 1..174: mol_type = other DNA
tgctcctctacctgctctactctcaatccgccagaatcatgggctgctgtggctgttctggaggctgtggctctggctgtgggggctgtggctccggcagtgggggctgtggctctggctgtgggggctgtggctccagctgctgtgtgcccatttgctgctgcaagcctgtgt

SEQ ID NO: 528 - DNA, 174 bp, synthetic construct
  misc_feature 1..174: note = Description of Artificial Sequence: Synthetic polynucleotide
  source 1..174: mol_type = other DNA
tgctctggaccccagccccacttgctctagatgctcacccaccgtccccaggaagcagaacagaggggtcggacccctggtccttcctttgagtggaacgtgctggccaaagcgctctatgacaatgtggccgagtccccggatgagctctccttccgcaagggtgacatcatg

SEQ ID NO: 529 - DNA, 174 bp, synthetic construct
  misc_feature 1..174: note = Description of Artificial Sequence: Synthetic polynucleotide
  source 1..174: mol_type = other DNA
tgctgccctgactttttaagaaatctcaatgaactatttgtagagaatcactgatccggcctgcaagcattttgcacggcaaaaatatcgatcagtgttaagtgaagatcacattttatatgcgatcttgacttttttgtcttacattatatttttatagattttgttataaac

SEQ ID NO: 530 - DNA, 174 bp, synthetic construct
  misc_feature 1..174: note = Description of Artificial Sequence: Synthetic polynucleotide
  source 1..174: mol_type = other DNA
tgctggagtcgtgtgttttggctgcgcgtgatcctgcgtgggtcgggaggtgtttctgtgtaggtgtctggccctttcatcagtcgtgcggaggaccgcgtgatttccttccagttctcctcggttttcaggaaaagcctaaagattagactgtaagaaaagaaaatagaagcc

SEQ ID NO: 531 - DNA, 174 bp, synthetic construct
  misc_feature 1..174: note = Description of Artificial Sequence: Synthetic polynucleotide
  source 1..174: mol_type = other DNA
tgctttatagcgtgcaaacctcgccgcgccagggccaagggacaggttggagctgttgatctgttgcgcaattgctattttccccagagcggctttgtctttggatttagcgtttcagaattgcaattccaaaatgtgtaagacgggatattctcttctgtgctgtcaagggac

SEQ ID NO: 532 - DNA, 174 bp, synthetic construct
  misc_feature 1..174: note = Description of Artificial Sequence: Synthetic polynucleotide
  source 1..174: mol_type = other DNA
tggaagatgggaaatggccaaaagaataaaccatttcctcttacttaccgaatgaaaagcttgcttcatcttggcgttcaagactctctaatatgattccacctgttgggctctttcttccatttgcctccgcagatagtgtctgccttctggagagctgaccaaacactaagg

SEQ ID NO: 533 - DNA, 117 bp, synthetic construct
  misc_feature 1..117: note = Description of Artificial Sequence: Synthetic polynucleotide
  source 1..117: mol_type = other DNA
cacttggcttcaaagctggctcttggaaattgagcggagagcgacgcggttgttgtagctgccgctgcggccgccgcggaataataagccgggatctaccatacccattgactaact

SEQ ID NO: 534 - DNA, 174 bp, synthetic construct
  misc_feature 1..174: note = Description of Artificial Sequence: Synthetic polynucleotide
  source 1..174: mol_type = other DNA
tggctgaggaaggaggaggcacccacaggctgctgggaggagagcataaggaatctacttgaaaatggatcggtttatgttggattaaatgctgctctttgtggcctcatagcaaacagtctttttcgacgcatcttgaatgtgacaaaggctcgcatagctgctggcttacca

SEQ ID NO: 535 - DNA, 174 bp, synthetic construct
  misc_feature 1..174: note = Description of Artificial Sequence: Synthetic polynucleotide
  source 1..174: mol_type = other DNA
tgggagcgatctggaaagctgcacttgtgctcccttcctcgtaggtttgctgtggaacgttgtggcttctgtggctcctcaggcccgggggcgccccttgaaccctccactcttggctccaagcaccttccctgggaagctgtatctgctgggttcgcagacaggaacagaaac

SEQ ID NO: 536 - DNA, 174 bp, synthetic construct
  misc_feature 1..174: note = Description of Artificial Sequence: Synthetic polynucleotide
  source 1..174: mol_type = other DNA
tggggtgcccagaacactggccctgggctagcgacttgcctcagccccatttcccggagaggctgccatgaagaggaagccggcggagtcttggtgctgagtctgagggcttcaggcaggacccaagactctcctctgaggtagcagcccccagagaaggttagctgttctctg

SEQ ID NO: 537 - DNA, 174 bp, synthetic construct
  misc_feature 1..174: note = Description of Artificial Sequence: Synthetic polynucleotide
  source 1..174: mol_type = other DNA
tggggtttgtgaagtcgtggcccgttagcaggaagcctaacagtcgccccgacgctagtgagggacccaatctgagtccccggccagccgaatccaagccgtgtgtactgcgtgctcagcactgcccgacagtcctagctaaacttcgccaactccgctgcctttgccgccacc

SEQ ID NO: 538 - DNA, 174 bp, synthetic construct
  misc_feature 1..174: note = Description of Artificial Sequence: Synthetic polynucleotide
  source 1..174: mol_type = other DNA
tggtggcagcaggtgcttagcagcccttgtccagtctcgcctgtgacactgctgctcccttcccctgtcctgacctcctggttggctgtcctgccagagccttgcctggaagatgaaattccagctaccctgtgggagcagtaacgccttcttccttcttctcaatctccagaa

SEQ ID NO: 539 - DNA, 174 bp, synthetic construct
  misc_feature 1..174: note = Description of Artificial Sequence: Synthetic polynucleotide
  source 1..174: mol_type = other DNA
tgtccagtgccaaaaccaagatcaaaaagcaacctcagaccaatacccagagattctcacattaaagagcaaagtcaacagaaaatcagcccagcagccgtaggagaggagtcatccccaggccggccccagtctctgctggacaacgctagcacctcagacagtcaggcagtg

SEQ ID NO: 540 - DNA, 174 bp, synthetic construct
  misc_feature 1..174: note = Description of Artificial Sequence: Synthetic polynucleotide
  source 1..174: mol_type = other DNA
tgtcgtaagattttttcttttcattttctccagggagggtaaatcaatataacctcttctctagagaggaggtggttaggttggtcttaagcagtgttagaagatctattttttttcaaaccaggtgtctgagctgggtgaattccagcctggggagaggactttgatcaccag

SEQ ID NO: 541 - DNA, 174 bp, synthetic construct
  misc_feature 1..174: note = Description of Artificial Sequence: Synthetic polynucleotide
  source 1..174: mol_type = other DNA
tgtgacttcacctcagttttgtgatccgtaaaatggacaaattcgaagctacttcacagtgctgttgagaggattaaatgaaacaatgcttgtaaagctctttgcaggagggagcctcggaagcagggcctggccggcagagcacacctgctgtcaccagggaccacaggcagc

SEQ ID NO: 542 - DNA, 174 bp, synthetic construct
  misc_feature 1..174: note = Description of Artificial Sequence: Synthetic polynucleotide
  source 1..174: mol_type = other DNA
tgtgagaggagcaggttcaggtaaacaaagggcgaggacccgagcgagcttaaggagtggggtgcagcgtctggtcagcggagggtgaattctcaggactggtcgggagtcaaggtgccacatctcctgcctttctgctcactttcctgcctgttttgcctgaccacagccatc

SEQ ID NO: 543 - DNA, 174 bp, synthetic construct
  misc_feature 1..174: note = Description of Artificial Sequence: Synthetic polynucleotide
  source 1..174: mol_type = other DNA
tgtgctgagctggcgcagcggcagcagcatgagccggaccctcgcatcggccgtgcccctgtcgagtcccgactactacgagaggctgggccaactccagcacgggctgcgggacagtgaaaagaagagattggacctggaaaagaaactttatgaatataatcagtctgatac

SEQ ID NO: 544 - DNA, 174 bp, synthetic construct
  misc_feature 1..174: note = Description of Artificial Sequence: Synthetic polynucleotide
  source 1..174: mol_type = other DNA
tgtgctttctctctgtttcagctgttttccttttaagatactcctctcagatttgtgtgcttcttcccttcccacattctatactgcccagcgcctgggattccagatctgcgtttgaatccaggaaagggaggtggacacctgcgcaggtgtgtgccctccggcccctgaagc

SEQ ID NO: 545 - DNA, 174 bp, synthetic construct
  misc_feature 1..174: note = Description of Artificial Sequence: Synthetic polynucleotide
  source 1..174: mol_type = other DNA
tgtgtgtatttcctcccgttctttatcagagcccccaaaataagtaggaatgggcagtggctattcacattcactacaccttttccatttgctaataaggccctgccaggctgggagggaattgtccctgcctgcttctggagaaagaagatattgacaccatctacgggcacc

SEQ ID NO: 546 - DNA, 174 bp, synthetic construct
  misc_feature 1..174: note = Description of Artificial Sequence: Synthetic polynucleotide
  source 1..174: mol_type = other DNA
tgttcgccgttactctgcgcgtaagtcgcttgtccgtggcttctctgagaagaaaagttgaaaaagggtaaaagttttcaggaatattcgggctctctattgctaagcatagcgagtgtcggttttctctctccaacagacatcgctattgcggttccgaggcagtgggaagag

SEQ ID NO: 547 - DNA, 174 bp, synthetic construct
  misc_feature 1..174: note = Description of Artificial Sequence: Synthetic polynucleotide
  source 1..174: mol_type = other DNA
ttcagaatgcagtgtactgttgtggagtcttcccgctatctagttccaaaatttcatcaccccaaatggaaatcctttacccattgacagttactccccattctccccttcctctagcccctggcaaccactaatctgctttctatctatggatttgcctattctggacatttc

SEQ ID NO: 548 - DNA, 174 bp, synthetic construct
  misc_feature 1..174: note = Description of Artificial Sequence: Synthetic polynucleotide
  source 1..174: mol_type = other DNA
ttcatctattgtaggcctagcccctgcctttgaaaacaaggaaaggttggtagaacatcaacacagcatggaatttccagggaggtctcatttcaaaacttcataaagaacaagaaccacctggacttctgtgagggcgatgattaaactggcctgagtttgaatgaaaggata

SEQ ID NO: 549 - DNA, 174 bp, synthetic construct
  misc_feature 1..174: note = Description of Artificial Sequence: Synthetic polynucleotide
  source 1..174: mol_type = other DNA
ttcatggtgactgggacgagtaggtttcactgtttctcataggagacttgacagcttaaagtaaaaacaaattattttcgtcaaagtttttttttttctcttaactgatttttagcaaacctcagactgagacacaggactcaacggtgtattcctggaaggcaaggtgctata

SEQ ID NO: 550 - DNA, 174 bp, synthetic construct
  misc_feature 1..174: note = Description of Artificial Sequence: Synthetic polynucleotide
  source 1..174: mol_type = other DNA
ttccccaagtcacacagtggtatcagagctaagaatgggacccagatatgactgatctagttctgttccaaaaccgtgctgtattatattaacgcctaccctctgaagaggtccaagcaacggaagtactactacgaagctgcctttctggccatccttgagaaaaatagacag

SEQ ID NO: 551 - DNA, 174 bp, synthetic construct
  misc_feature 1..174: note = Description of Artificial Sequence: Synthetic polynucleotide
  source 1..174: mol_type = other DNA
ttcccccgccgccaggctgacttctcatcgcttgtttttctttttgcatttttcctcccaccgccgttgccgccctccccgtcctggccgtccgccctccgccctctgcagggacatctctacaccgttcccatccgggaacagggcaacatctacaagcccaacaacaaggcc

SEQ ID NO: 552 - DNA, 174 bp, synthetic construct
  misc_feature 1..174: note = Description of Artificial Sequence: Synthetic polynucleotide
  source 1..174: mol_type = other DNA
ttccggcgttgttgaccctatttcccgtgctgcaccgcagcccctttctcttccggttctaggcgcttcgggagccgcggcttatggtgcagacatggccaagtccaagaaccacaccacacacaaccagtcccgaaaatggcacagaaatggtatcaagaaaccccgatcaca

SEQ ID NO: 553 - DNA, 174 bp, synthetic construct
  misc_feature 1..174: note = Description of Artificial Sequence: Synthetic polynucleotide
  source 1..174: mol_type = other DNA
ttcctgctcttgaatatctggttgaactacttaagcttaatttgttaaactccggtaagtacctagcccacatgatttgactcagagattctcttttgtccacagacagtcatctcaggagcagaaagaaaagagctcccaaatgctatatctattcaggggctctcaagaaca

SEQ ID NO: 554 - DNA, 174 bp, synthetic construct
  misc_feature 1..174: note = Description of Artificial Sequence: Synthetic polynucleotide
  source 1..174: mol_type = other DNA
ttcctggtccagaactttacacagaaaaggtgctcaaaggatatttgtttaatgaatgtggtatgctgacatttaaacaggacaaaacttgtagaacttcatggaggaacacggagtgacccaaaccgaacatatggctaccatagaagcacatgcagtggcccagcaagtgca

SEQ ID NO: 555 - DNA, 174 bp, synthetic construct
  misc_feature 1..174: note = Description of Artificial Sequence: Synthetic polynucleotide
  source 1..174: mol_type = other DNA
ttctgcgtttctctagtgcagtgcctggagatgaccaccaaacggaaaatcatcggccgtctggtgccatgccgatgtttccgaggtgaagaagaaatcatctcagttttagattactcccactgcagtcttcagcaggtgccaaaggaggtctttaacttcgaacgaacatta

SEQ ID NO: 556 - DNA, 174 bp, synthetic construct
  misc_feature 1..174: note = Description of Artificial Sequence: Synthetic polynucleotide
  source 1..174: mol_type = other DNA
ttctgtaccgcgtctgatgatggagagtcccggggacacctccgcggacacgtgttggactcagggctttaggcccgtgacagctgacagcttcagacacaggaggaagggagggaagggggaggacagaggagacaggcaggtgctgtcctcaaagccctgcgttcttctgag

SEQ ID NO: 557 - DNA, 174 bp, synthetic construct
  misc_feature 1..174: note = Description of Artificial Sequence: Synthetic polynucleotide
  source 1..174: mol_type = other DNA
ttctgtgacctgctcctgggactttgctggctcacggagacacttctctatggagcttcagtagcaaataaggacatcatctgctataacctacaagcagttggacagatattctacatttcctcatttctctacaccgtcaattacatctggtatttgtacacagagctgagg

SEQ ID NO: 558 - DNA, 174 bp, synthetic construct
  misc_feature 1..174: note = Description of Artificial Sequence: Synthetic polynucleotide
  source 1..174: mol_type = other DNA
ttctgttcttggagtctagacagcatcaggagttgggctcagtgaacaaaactttaatgtctagagcatttatgagggttttaatgattggaaaatctatcctgagaatgtggtcaccatatgtgacagccttgctttctatcttgtcttcagtttctggggcttctctgcaga

SEQ ID NO: 559 - DNA, 174 bp, synthetic construct
  misc_feature 1..174: note = Description of Artificial Sequence: Synthetic polynucleotide
  source 1..174: mol_type = other DNA
ttgaagcaaggttgtggagaaaagcaaaggagacaaaaagtaaccttcctgaagaggacatgtgattggaagttgtcaattgttgaagcattggtaactccagtctctaacgttttagaaaatcataacaagcggttctctaccctgtaaaggtgaactactgagttcttcatt

SEQ ID NO: 560 - DNA, 174 bp, synthetic construct
  misc_feature 1..174: note = Description of Artificial Sequence: Synthetic polynucleotide
  source 1..174: mol_type = other DNA
ttgagttttccccaggctgctctattgttgcctgtagctgtgatttttcaggcaggctgctcctctgaggaccacccttaactgtctacctaactggtttttccttttcttctcctcatttgtatttatgtatcagtgtattatgtatttatatacacttggagatacagtaaa

SEQ ID NO: 561 - DNA, 174 bp, synthetic construct
  misc_feature 1..174: note = Description of Artificial Sequence: Synthetic polynucleotide
  source 1..174: mol_type = other DNA
ttgcacaaaaacctggaatcttttaggagtctcctcccagtcgttgaaggtttggggagcagctgatacagcaaggagggctcttgcaaggattcaagctccgagccctggaggagcagcacggagcgggagagcgtggcgagagaatgaagaaaccaatcgcccgggagaagc

SEQ ID NO: 562 - DNA, 174 bp, synthetic construct
  misc_feature 1..174: note = Description of Artificial Sequence: Synthetic polynucleotide
  source 1..174: mol_type = other DNA
ttgcctgattccgcacgagagtgtcaatgaagacctcaaagtctggagaaaaatgacctttcatggaataagaagtatacctccttctacatgtttttgtcttactgacctctgataactggaacacatgactctgggtctgtagaaagtcaactgatcaaactcatcctcacc

SEQ ID NO: 563 - DNA, 174 bp, synthetic construct
  misc_feature 1..174: note = Description of Artificial Sequence: Synthetic polynucleotide
  source 1..174: mol_type = other DNA
ttgcttcaggccatctggatgtatacatgcaggtcacagggaatatgatggcttagcttgggttcagaggcctgacacctcaggctgccaaatgtggaagatttaaatacttgaaccaataccctcctcccaaaaactgaaattggcttctgtttctgagttggtccaggcgca

SEQ ID NO: 564 - DNA, 174 bp, synthetic construct
  misc_feature 1..174: note = Description of Artificial Sequence: Synthetic polynucleotide
  source 1..174: mol_type = other DNA
ttggagagaggggtgatgcctggtgctggtggaacccctgcacagagacggacacaggatgagctctaagtacccgcggtctgtccggcgctgcctgcccctctgggccctaacactggaagcagctctcattctcctcttctatttttttacccactatgacgcttccttaga

SEQ ID NO: 565 - DNA, 174 bp, synthetic construct
  misc_feature 1..174: note = Description of Artificial Sequence: Synthetic polynucleotide
  source 1..174: mol_type = other DNA
ttggggaggtgagaggtgatttcctgccattcttctgtggggcgggcttcccagggtgctcatgccaggctgacgggtccagtgcgggctcccgctgctgggggagagctgggttttcatggggcggcagccgaggcaggacccgcagccatgaaccgcttcaatgggctctgc

SEQ ID NO: 566 - DNA, 174 bp, synthetic construct
  misc_feature 1..174: note = Description of Artificial Sequence: Synthetic polynucleotide
  source 1..174: mol_type = other DNA
ttggggcctgggttcctttgccccttgcccaccagggaggggtgggagacgagagagggtgaactttcccctgcgagattctggtgaaaggggaaatatgcttcgagtcagtaaagctgcgcaagtgcacagtcaaggagagagtcttgggaaaaccaaggatagttcccggag

SEQ ID NO: 567 - DNA, 174 bp, synthetic construct
  misc_feature 1..174: note = Description of Artificial Sequence: Synthetic polynucleotide
  source 1..174: mol_type = other DNA
ttgtcccaagtcgattgatttcccagctatattgtggcctgaagcctccagcgtccacacgaaaccagatttgcctgaaaatggctcggccaagttcaagacctggcgactcccctggcctttgcccacaacccgtcccgggtgtgggagttctaccactaccggcgggaggtc

SEQ ID NO: 568 - DNA, 174 bp, synthetic construct
  misc_feature 1..174: note = Description of Artificial Sequence: Synthetic polynucleotide
  source 1..174: mol_type = other DNA
ttgtttgttgtgttttccctggcaaacagctggagaaagagcagctcatggagaggctgagagaagcggttttcgcgtcctacccaaactgggagagtaaccttcagcagctggactcaccgattggttttccttcattttcagtgaaatcccattctctggctggagacacag

SEQ ID NO: 569 - DNA, 174 bp, synthetic construct
  misc_feature 1..174: note = Description of Artificial Sequence: Synthetic polynucleotide
  source 1..174: mol_type = other DNA
tttagtgtcacaggagacacgagggcaaagtgctgaggaaactctagagcaacatcggaatgcatggtgaagcatcagatggtgaaggagaaggagacacagaagtgatgcagcaggagacagttccagttcctgtaccttcagagaaaaccaaacagcctaaagaatgttttt

SEQ ID NO: 570 - DNA, 174 bp, synthetic construct
  misc_feature 1..174: note = Description of Artificial Sequence: Synthetic polynucleotide
  source 1..174: mol_type = other DNA
tttccgggtgtgtgtttccggcgtcggcggccgcggccggggacggtgtgagagcggtaagatggcggcggcggcggtggtggagttccagagagcccagtctctactcagcaccgaccgggaggcctccatcgacatcctccactccatcgtgaagcgtgacattcaggaaaa

SEQ ID NO: 571 - DNA, 174 bp, synthetic construct
  misc_feature 1..174: note = Description of Artificial Sequence: Synthetic polynucleotide
  source 1..174: mol_type = other DNA
tttcctttcggccggaaccgccatcttccagtaattcgccaaaatgacgaacacaaagggaaagaggagaggcacccgatatatgttctctaggccttttagaaaacatggagttgttcctttggccacatatatgcgaatctataagaaaggtgatattgtagacatcaaggg

SEQ ID NO: 572 - DNA, 174 bp, synthetic construct
  misc_feature 1..174: note = Description of Artificial Sequence: Synthetic polynucleotide
  source 1..174: mol_type = other DNA
tttctagtaccttctcaggatccctcctccgccaacgaattcctcaaccacgggccaagcaaactactcccccgcccactgtcagcagcagtctctgttgaatgggaatactgcaccttcaggcttaacgccacgtgggctcctttgctgtcctccaggcactgttatagaaga

SEQ ID NO: 573 - DNA, 174 bp, synthetic construct
  misc_feature 1..174: note = Description of Artificial Sequence: Synthetic polynucleotide
  source 1..174: mol_type = other DNA
tttgaaagcgtgggctgaatgctgacctcccggacatcatgagtgttgttctacctgcgccccctggacatcctggcggaagtggtcccttctgatggcgccacaagcgggatcaggatagttcaggttcacggtgcacggggactccagctctcagtagccgccccccgcacc

SEQ ID NO: 574 - DNA, 174 bp, synthetic construct
  misc_feature 1..174: note = Description of Artificial Sequence: Synthetic polynucleotide
  source 1..174: mol_type = other DNA
tttgcgggaaagcagcggacttgaaaatactggaaatctgtccggatccaaattattttgcaagccagatgagtaaccagagggcatgaaaggttgagaacatttgacttccctgcaaaccttggtatagatcacttccttttctgtaggaaaggaaaggcaccaaagagcaca

SEQ ID NO: 575 - DNA, 174 bp, synthetic construct
  misc_feature 1..174: note = Description of Artificial Sequence: Synthetic polynucleotide
  source 1..174: mol_type = other DNA
tttgggcattgtccccgggtcttccaacggactgggcgttgctcccggacactgaggactggccccggggtctcgctcaccttcagcagcgtccaccgcctgccacagagcgttcgatcgctcgctgcctgagctcctggtgcgcccgcggacgcagcctccagcttcgcggag

SEQ ID NO: 576 - DNA, 174 bp, synthetic construct
  misc_feature 1..174: note = Description of Artificial Sequence: Synthetic polynucleotide
  source 1..174: mol_type = other DNA
tttggtctgcttctcgaaggttcaattcacagagcacttcatatctaccagggtaatatcaaaatatatgttcctaaaacatccctgagttcaccaccttggccagaagttgttctgccagacccagttgaggagaccagacaccatgcagaggtcgtgaagaaggtgaatgag

SEQ ID NO: 577 - DNA, 174 bp, synthetic construct
  misc_feature 1..174: note = Description of Artificial Sequence: Synthetic polynucleotide
  source 1..174: mol_type = other DNA
ttttcagcctgtgatttgataaccgccgccgggtggcgtggagcgtcccgagacttcttccttcattgcagcccctcttcttttagttctagactgaagttcgaggaacgcaccacttggctgaaattaggatccagatttcccaaacttccttcggaggaaaaagccctaacg

SEQ ID NO: 578 - DNA, 174 bp, synthetic construct
  misc_feature 1..174: note = Description of Artificial Sequence: Synthetic polynucleotide
  source 1..174: mol_type = other DNA
ttttgattgccatttccttgggacagcctgaagagagaatcgaaagaagttcttttcagtatggttgcataacatcgagtcggagattgtgaaatgtcctttgagaaaaatgtacgggcaggaagatgaataggtgtctgtttgattaaggctctccttcggaaagatgtcgga

SEQ ID NO: 579 - DNA, 174 bp, synthetic construct
  misc_feature 1..174: note = Description of Artificial Sequence: Synthetic polynucleotide
  source 1..174: mol_type = other DNA
ttttgccggatgttgttgtatgtccgagagacacgtgaggttctgctacgtcattaccaggcacgcgcaggaaacatggcggcggcgggtgttgtgagcgggaaggtttttggtttcttcttgattcaatcttgataagtagtatgtgtccaggactttatccatactccagtt

SEQ ID NO: 580 - DNA, 174 bp, synthetic construct
  misc_feature 1..174: note = Description of Artificial Sequence: Synthetic polynucleotide
  source 1..174: mol_type = other DNA
ttttttttttttttttttgagaaaggggaatttcatcccaaataaaaggaatgaagtctggctccggaggagggtccccgacctcgctgtgggggctcctgtttctctccgccgcgctctcgctctggccgacgagtggagaaatctgcgggccaggcatcgacatccgcaacg

SEQ ID NO: 581 - DNA, 233 bp, synthetic construct
  misc_feature 1..233: note = Description of Artificial Sequence: Synthetic polynucleotide
  source 1..233: mol_type = other DNA
cagagatccaggggaggcgcctgtgaggcccggacctgccccggggcgaagggtatgtggcgagacagagccctgcacccctaattcccggtggaaaactcctgttgccgtttccctccaccggcctggagtctcccagtcttgtcccggcagtgccgccctccccactaagacctaggcgcaaaggcttggctcatggttgacagctcagagagagaaagatctgagggaag

SEQ ID NO: 582 - DNA, 30 bp, synthetic construct
  misc_feature 1..30: note = Description of Artificial Sequence: Synthetic oligonucleotide
  source 1..30: mol_type = other DNA
gttgtcagtccgatctcgcgagagaggacg

SEQ ID NO: 583 - DNA, 117 bp, synthetic construct
  misc_feature 1..117: note = Description of Artificial Sequence: Synthetic polynucleotide
  source 1..117: mol_type = other DNA
atggaggagccgcagtcagatcctagcgtcgagccccctctgagtcaggaaacattttcagacctatggaaactacttcctgaaaacaacgttctgtcccccttgccgtcccaagca

SEQ ID NO: 584 - DNA, 180 bp, synthetic construct
  misc_feature 1..180: note = Description of Artificial Sequence: Synthetic polynucleotide
  source 1..180: mol_type = other DNA
cagaaagtgccacgactccacacgcgcgcacgcagccagcgagcggccggagcggacggcagacggggcgggcggcgtcagggtcgcagcgtctacagctgctcgggggcggtttcttggcggaggcttggccggctcctctctcccggctccgcggcggctgcgaaggcggcggctcct

SEQ ID NO: 585 - DNA, 237 bp, synthetic construct
  misc_feature 1..237: note = Description of Artificial Sequence: Synthetic polynucleotide
  source 1..237: mol_type = other DNA
agtctatgaggagggacctacaaagactggaaactattcttagctccgtcactgactccaagttcatcccctctgtctttcagtttggttgagatataggctactcttcccaactcagtcttgaagagtatcaccaactgcctcatgtgtggtgaccttcactgtcgtatgccagtgactcatctggagtaatctcaacaacgagttaccaatacttgctcttgattgataaacaga

SEQ ID NO: 586 - DNA, 94 bp, synthetic construct
  misc_feature 1..94: note = Description of Artificial Sequence: Synthetic oligonucleotide
  source 1..94: mol_type = other DNA
acttgtttcctttcatttcctttttttcttttcttttcttttttttttttttttttttttttgagaaaggggaatttcatcccaaataaaagga

SEQ ID NO: 587 - DNA, 100 bp, synthetic construct
  misc_feature 1..100: note = Description of Artificial Sequence: Synthetic polynucleotide
  source 1..100: mol_type = other DNA
ggcccccgccttccgcgccccccacgggaaggaagcacccccggtattaaaacgaacggggcggaaagaagccctcagtcgccggccgggaggcgagccg

SEQ ID NO: 588 - DNA, 180 bp, synthetic construct
  misc_feature 1..180: note = Description of Artificial Sequence: Synthetic polynucleotide
  source 1..180: mol_type = other DNA
ggcgcctccctctgttcctcccaaggctaaactttctaattcccttctttgggctcgggggctcccggagcagggcgagagctcgcgtcgccggaaaggaagacgggaagaaagggcaggcggctcggcgggcgtcttctccactcctctgccgcgtccccgtggctgcagggagccggc

SEQ ID NO: 589 - DNA, 71 bp, synthetic construct
  misc_feature 1..71: note = Description of Artificial Sequence: Synthetic oligonucleotide
  source 1..71: mol_type = other DNA
ccacctgttgcaacttcttttttacagatggagtcatcagaacccactgtgaggaagtgacttctccttga

SEQ ID NO: 590 - DNA, 228 bp, synthetic construct
  misc_feature 1..228: note = Description of Artificial Sequence: Synthetic polynucleotide
  source 1..228: mol_type = other DNA
tgcggcgccattttaagcctctcggtctgtggcagcagcgttggcccggccccgggagcggagagcgaggggaggcggagacggaggaaggtctgaggagcagcttcagtccccgccgagccgccaccgcaggtcgaggacggtcggactcccgcggcgggaggagcctgttcccctgagggtatttgaagtataccatacaactgttttgaaaatccagcgtggaca

SEQ ID NO: 591 - DNA, 150 bp, synthetic construct
  misc_feature 1..150: note = Description of Artificial Sequence: Synthetic polynucleotide
  source 1..150: mol_type = other DNA
tgatttctttttgtggtaaaaatcttagttcatgtgaagaaatttcatgtgaatgttttagctatcaaacagtactgtcacctactcatgcacaaaactgcctcccaaagacttttcccaggtccctcgtatcaaaacattaagagtata

SEQ ID NO: 592 - DNA, 166 bp, synthetic construct
  misc_feature 1..166: note = Description of Artificial Sequence: Synthetic polynucleotide
  source 1..166: mol_type = other DNA
cacacggactacaggggagttttgttgaagttgcaaagtcctggagcctccagagggctgtcggcgcagtagcagcgagcagcagagtccgcacgctccggcgaggggcagaagagcgcgagggagcgcggggcagcagaagcgagagccgagcgcggacccagcc

SEQ ID NO: 593 - DNA, 472 bp, synthetic construct
  misc_feature 1..472: note = Description of Artificial Sequence: Synthetic polynucleotide
  source 1..472: mol_type = other DNA
cttcttcgtcagcctcccttccaccgccatattgggccactaaaaaaagggggctcgtcttttcggggtgtttttctccccctcccctgtccccgcttgctcacggctctgcgactccgacgccggcaaggtttggagagcggctgggttcgcgggacccgcgggcttgcacccgcccagactcggacgggctttgccaccctctccgcttgcctggtcccctctcctctccgccctcccgctcgccagtccatttgatcagcggagactcggcggccgggccggggcttccccgcagcccctgcgcgctcctagagctcgggccgtggctcgtcggggtctgtgtcttttggctccgagggcagtcgctgggcttccgagaggggttcgggctgcgtaggggcgctttgttttgttcggttttgtttttttgagagtgcgagagaggcggtcgtgcagacccgggagaaag

SEQ ID NO: 594 - DNA, 1578 bp, synthetic construct
  misc_feature 1..1578: note = Description of Artificial Sequence: Synthetic polynucleotide
  source 1..1578: mol_type = other DNA
catagagccagcgggcgcgggcgggacgggcgccccgcggccggacccagccagggcaccacgctgcccggccctgcgccgccaggcacttctttccggggctcctagggacgccagaaggaagtcaacctctgctgcttctccttggcctgcgttggaccttcctttttttgttgtttttttttgtttttcccctttcttccttttgaattaactggcttcttggctggatgttttcaacttctttcctggctgcgaacttttccccaattgttttccttttacaacagggggagaaagtgctctgtggtccgaggcgagccgtgaagttgcgtgtgcgtggcagtgtgcgtggcaggatgtgcgtgcgtgtgtaacccgagccgcccgatctgtttcgatctgcgccgcggagccctccctcaaggcccgctccacctgctgcggttacgcggcgctcgtgggtgttcgtgcctcggagcagctaaccggcgggtgctgggcgacggtggaggagtatcgtctcgctgctgcccgagtcagggctgagtcacccagctgatgtagacagtggctgccttccgaagagtgcgtgtttgcatgtgtgtgactctgcggctgctcaactcccaacaaaccagaggaccagccacaaacttaaccaacatccccaaacccgagttcacagatgtgggagagctgtagaaccctgagtgtcatcgactgggccttcttatgattgttgttttaagattagctgaagatctctgaaacgctgaattttctgcactgagcgttttgacagaattcattgagagaacagagaacatgacaagtacttctagctcagcactgctccaactactgaagctgattttcaaggctacttaaaaaaatctgcagcgtacattaatggatttctgttgtgtttaaattctccacagattgtattgtaaatattttatgaagtagagcatatgtatatatttatatatacgtgcacatacattagtagcactacctttggaagtctcagctcttgcttttcgggactgaagccagttttgcatgataaaagtggccttgttacgggagataattgtgttctgttgggactttagacaaaactcacctgcaaaaaactgacaggcattaactactggaacttccaaataatgtgtttgctgatcgttttactcttcgcataaatattttaggaagtgtatgagaattttgccttcaggaacttttctaacagccaaagacagaacttaacctctgcaagcaagattcgtggaagatagtctccactttttaatgcactaagcaatcggttgctaggagcccatcctgggtcagaggccgatccgcagaaccagaacgttttcccctcctggactgttagtaacttagtctccctcctcccctaaccacccccgcccccccccaccccccgcagtaataaaggcccctgaacgtgtatgttggtctcccgggagctgcttgctgaagatccgcgcccctgtcgccgtctggtaggagctgtttgcagggtcctaactcaatcggcttgttgtg

SEQ ID NO: 595 - DNA, 348 bp, synthetic construct
  misc_feature 1..348: note = Description of Artificial Sequence: Synthetic polynucleotide
  source 1..348: mol_type = other DNA
ttaagtacaaggtaaatatattttattcttaatattttaaggaatttgatttagacatttttcctttctagggacagtttggataattttccgtgaaactggatgatctttgaatattaaatgaaaggagactagaataacagtctcttgactattcatgaaggagctttagcagaagcattctttcttggtgtgcaaatcacgcctggcagcccctgcccacagtacccgaagatggcaggccttgttcccttcacctaaattcataaacctgggtgtagtggcttctgatgctgatttgtttctcttttcagtaagtgtggacctttgtgtaccagagagaacatc

SEQ ID NO: 596 - DNA, 40 bp, synthetic construct
  misc_feature 1..40: note = Description of Artificial Sequence: Synthetic oligonucleotide
  source 1..40: mol_type = other DNA
attccagcgcctgacagccaggaccccaggcagcagcgag

SEQ ID NO: 597 - DNA, 132 bp, synthetic construct
  misc_feature 1..132: note = Description of Artificial Sequence: Synthetic polynucleotide
  source 1..132: mol_type = other DNA
atgaagaagaaaacccggcgccgctcgacccggagcgaggagttgacccggagcgaggagttgaccctgagtgaggaagcgacctggagtgaagaggcgacccagagtgaggaggcgacccagggcgaagag

SEQ ID NO: 598 - DNA, 94 bp, synthetic construct
  misc_feature 1..94: note = Description of Artificial Sequence: Synthetic oligonucleotide
  source 1..94: mol_type = other DNA
cgggcccctgccgcctgcaagtcggaaattgcgctgtgctcctgtgctacggcctgtggctggactgcctgctgctgcccaactggctggcaag

SEQ ID NO: 599 - DNA, 367 bp, synthetic construct
  misc_feature 1..367: note = Description of Artificial Sequence: Synthetic polynucleotide
  source 1..367: mol_type = other DNA
aattccagcgagaggcagagggagcgagcgggcggccggctagggtggaagagccgggcgagcagagctgcgctgcgggcgtcctgggaagggagatccggagcgaatagggggcttcgcctctggcccagccctcccgctgatcccccagccagcggtccgcaacccttgccgcatccacgaaactttgcccatagcagcgggcgggcactttgcactggaacttacaacacccgagcaaggacgcgactctcccgacgcggggaggctattctgcccatttggggacacttccccgccgctgccaggacccgcttctctgaaaggctctccttgcagctgcttagacgctggatttttttcgggt

SEQ ID NO: 600 - DNA, 315 bp, synthetic construct
  misc_feature 1..315: note = Description of Artificial Sequence: Synthetic polynucleotide
  source 1..315: mol_type = other DNA
acacggtttttaagaaagaacttctaaccccactccaccgcccaacggtcacgtgacgcgcctgcgtcctcgcctcaaggttttttctggtcgcatattggctgttaactcggctacggggtgtagcgaggtgcattccggaagtaggtcctttgacttttgcttcctctacggaggcaagtaacaacccggcggtcgacgcttagcggaagttcgtcaagtcgcagttgcccccgcacagcggatgtgggtcgcctcttaggtgacgctgggaagtgcctgcagccttcgccgctgccttctggttgaagcact

SEQ ID NO: 601 - DNA, 101 bp, synthetic construct
  misc_feature 1..101: note = Description of Artificial Sequence: Synthetic polynucleotide
  source 1..101: mol_type = other DNA
ggcagggtggagaggtgggctcttcctgcttcccactcatcttatagctttctttccccagatccgaattcgagatccaaaccaaggaggaaaggatatca

SEQ ID NO: 602 - DNA, 119 bp, synthetic construct
  misc_feature 1..119: note = Description of Artificial Sequence: Synthetic polynucleotide
  source 1..119: mol_type = other DNA
ccttctgatggtgaatgggaactcccttcctcctgcagcagcctgcctgcagctgtcctggtagaacagtgtggacattgcagaagctgtcactgccccagaaagaaagcaccccagag

SEQ ID NO: 603 - DNA, 229 bp, synthetic construct
  misc_feature 1..229: note = Description of Artificial Sequence: Synthetic polynucleotide
  source 1..229: mol_type = other DNA
acttccggtggagggccgcctctgagcgggcggcgggccgacggcgagcgcgggcggcggcggtgacggaggcgccgctgccagggggcgtgcggcagcgcggcggcggcggcggcggcggcggcggcggaggcggcggcggcggcggcggcggcggcggctgggcctcgagcgcccgcagcccacctctcgggggcgggctcccggcgctagcagggctgaagagaag

SEQ ID NO: 604 - DNA, 918 bp, synthetic construct
  misc_feature 1..918: note = Description of Artificial Sequence: Synthetic polynucleotide
  source 1..918: mol_type = other DNA
ggactctgagggctttttggagctcgctatgcttaacctggagatgattaaggccccgcttcctggcctcccagcctctaatgccaaaagataagggagaggctggcgtgtgaccccgttttgagtcaggtggacagagggctggccaccttcggaaccatgggtgcaatacggagtcagacctcaatacaagcccactctttcacatatttgaacttttttcacatatcaactttttttgttcactgtgcagggattgttcattgctgctggaggaagatcatggactgtcgcgggaaactgaagtggttgagtatccactagtcgtggatgagggcagtgacttcgcagttttttgcgaattacacatctctttgattatgttgtgactagttttgttagatagtcatttagtgtttgggatacctgttaagccctttgtccagggactgtggttggatttatgaattatttggacggttgtccacttgaaagaactgacagtagcttcataacaatgttacaaatctcgttctaagattaagctgttgaacctatatttgccattagcgcttaatttttgaagtattatttttatgaatcaagccctggaaaaggacaagatatttgaatgaaatagcacccataatggagaacttcacagttgctactcctgtgataggtttatcttagtttcattgtggtataaatggaatagcaggtgttgtcaggtacaaggtttgtagcttgccaatatgttcattaccaacactgcagattcccattgagttggtgggggttttgttacctttgttttttttctcagcaaaataattctataactttttgtttgtgacaagaaatggactttcagtttacttaagattaatacttcttgaatgataaaatcattttgcc

SEQ ID NO: 605 - DNA, 216 bp, synthetic construct
  misc_feature 1..216: note = Description of Artificial Sequence: Synthetic polynucleotide
  source 1..216: mol_type = other DNA
ataacggctagcctgaggagctgctgcgacagtccactacctttttcgagagtgactcccgttgtcccaaggcttcccagagcgaacctgtgcggctgcaggcaccggcgcgtcgagtttccggcgtccggaaggaccgagctcttctcgcggatccagtgttccgtttccagcccccaatctcagagcggagccgacagagagcagggaaccggc

SEQ ID NO: 606 - DNA, 133 bp, synthetic construct
  misc_feature 1..133: note = Description of Artificial Sequence: Synthetic polynucleotide
  source 1..133: mol_type = other DNA
acaaggcagcctcgctcgagcgcaggccaatcggctttctagctagagggtttaactcctatttaaaaagaagaacctttgaattctaacggctgagctcttggaagacttgggtccttgggtcgcaggcatc

SEQ ID NO: 607 - DNA, 217 bp, synthetic construct
  misc_feature 1..217: note = Description of Artificial Sequence: Synthetic polynucleotide
  source 1..217: mol_type = other DNA
aatgcgcctgcagctcgcgctcccgcgccgatcccgagagcgtccgggccgccgtgcgcgagcgagggagggcgcgcgcgcggggggggcgcgcttgtgagtgcgggccgcgctctcggcggcgcgcatgtgcgtgtgtgctggctgccgggctgccccgagccggcggggagccggtccgctccaggtggcgggcggctggagcgagggagcggac

SEQ ID NO: 608 - DNA, 1177 bp, synthetic construct
  misc_feature 1..1177: note = Description of Artificial Sequence: Synthetic polynucleotide
  source 1..1177: mol_type = other DNA
gcgcgggaggaggagaagcagtggggaggcgcagccgctcacctgcggggcagggcgcggaggagggacccgggctgcgcgctctcgggccgaggaaccaggacgcgcccggagcctcgcacgcggccaagctcggggcgtcccctcccctcggccgggcgaactcaaggggcgcagctctttgctttgacagagctggccggcggaggcgtgcagagcggcgagccggcgagccaggctgagaaactcgagccgggaacaaagaggggtcggactgagtgtgtgtgtcggctcgagctccgggcagaggcatttgggcccgaggcccccgctgtgactccccgagactccgcagtgccctccactgcggagtccccgcgcttgccggcaaaaactttattcttggcaaacttctctttctcttcccctcctcctcggcccccatcttctgctcctcctccttctctagcagattaaatgagcctcgagaagaaaaaccgaagcgaaagggaagaaaataagaagatctaaaacggacatctccagcgtgggtggctcctttttctttttctttttttcccacccttcaggaagtggacgtttcgttatcttctgatccttgcaccttcttttggggcaaacggggcccttctgcccagatcccctctcttttctcggaaaacaaactactaagtcggcatccggggtaactacagtggagagggtttccgcggagacgcgccgccggaccctcctctgcactttggggaggcgtgctccctccagaaccggcgttctccgcgcgcaaatcccggcgacgcggggtcgcggggtggccgccggggcagcctcgtctagcgcgcgccgcgcagacgcccccggagtcgccagctaccgcagccctcgccgcccagtgcccttcggcctcgggggcgggcgcctgcgtcggtctccgcgaagcgggaaagcgcggcggccgccgggattcgggcgccgcggcagctgctccggctgccggccggcggccccgcgctcgcccgccccgcttccgcccgctgtcctgctgcacgaacccttccaactctcctttcctcccccacccttgagttacccctctgtctttcctgctgttgcgcgggtgctcccacagcggagcggagattacagagccgccggg

SEQ ID NO: 609 - DNA, 125 bp, synthetic construct
  misc_feature 1..125: note = Description of Artificial Sequence: Synthetic polynucleotide
  source 1..125: mol_type = other DNA
ttctccccgtgctcccccgttcttccctgcggagtgcgctgcgccgcccagccctgtcgccccccggaggtgatccctccctcctgcctgcccgccagcctgacctgtgcccggctcgcgggccg

SEQ ID NO: 610 - DNA, 199 bp, synthetic construct
  misc_feature 1..199: note = Description of Artificial Sequence: Synthetic polynucleotide
  source 1..199: mol_type = other DNA
gcaatccggagtgtcagctctccatctgtctctgcctggcaggcgcacgcgcccagcaccctgcctccggcgatgccgccccagcccctctgatggccctcctctctgctgccactcattccagaacaggaggcatgagcccggaacgcgcttgcttttaggagacagccactttctgtgtggtacgctggattcaagg

SEQ ID NO: 611 - DNA, 150 bp, synthetic construct
  misc_feature 1..150: note = Description of Artificial Sequence: Synthetic polynucleotide
  source 1..150: mol_type = other DNA
atatcaacctgtttcctcctcctccttctcctcctcctccgtgacctcctcctcctctttctcctgagaaacttcgccccagcggtgcggagcgccgctgcgcagccggggagggacgcaggcaggcggcgggcagcgggaggcggcagc

SEQ ID NO: 612 - DNA, 653 bp, synthetic construct
  misc_feature 1..653: note = Description of Artificial Sequence: Synthetic polynucleotide
  source 1..653: mol_type = other DNA
cagaataatgacatggttccttccatcctccaaaggtgaccaataatagtttgtaagtatcattatgaactaatgaattttcaacatatttgatatatttcaatccattgccatcattgttcttatcgatatttgagttggctcactttgccagtaagagtctattcaaattggcttctgagtccatttgacacaacacctttgatctttgacagtttccttggttttaggtgctagatgatttctcaggctcaccttagacatttcctgccacagacttagaatcagccatttctctaaggaccctgattccatttcatgagaaatgatagagaccacaatcaaaacaagtcatgaatttatactgatattttcaattcaaattaaagatgaggtttttgctaaatttttttgagtttatatttgtatgtcttatgctgaaaaatcttgtttcctaattagtaacataattattcatttgatgggtaaatattttagggccgattctttggttttatagccaagataccctgttgataaagtcttgtgggagcaattataagactggcttattttgaagctttttaaaaaagacatccttacctgttttaactgtagattatattaacttaaataggtacagcccacgcttg

SEQ ID NO: 613 - DNA, 396 bp, synthetic construct
  misc_feature 1..396: note = Description of Artificial Sequence: Synthetic polynucleotide
  source 1..396: mol_type = other DNA
ctcgagctgccgttgcaaagccaactttggaaaaagttttttgggggagacttgggccttgaggtgcccagctccgcgctttccgattttgggggcctttccagaaaatgttgcaaaaaagctaagccggcgggcagaggaaaacgcctgtagccggcgagtgaagacgaaccatcgactgccgtgttccttttcctcttggaggttggagtcccctgggcgcccccacacggctagacgcctcggctggttcgcgacgcagccccccggccgtggatgctcactcgggctcgggatccgcccaggtagcggcctcggacccaggtcctgcgcccaggtcctcccctgccccccagcgacggagccggggccgggggcggcggcgcccgggggcca

SEQ ID NO: 614 - DNA, 391 bp, synthetic construct
  misc_feature 1..391: note = Description of Artificial Sequence: Synthetic polynucleotide
  source 1..391: mol_type = other DNA
catcaccgaacgatgagagaggactacagcgacaaagtgaaagccagccactggagtcgcagcccgcctcggccgccgcgggagcggttcgagttgggagacggccggaagccagtaaaagaagagaaaatggaagaaagggacctgctgtccgacttacaggacatcagcgacagcgagaggaagaccagctcggccgagtcctcgtcagcggaatcaggctcaggttctgaggaagaagaggaggaggaggaagaggaggaggaggaagggagcaccagtgaagaatcagaggaggaggaggaggaagaggaagaggaggaggaggagaccggcagcaactctgaggaggcatcagagcagtctgccgaagaagtaagtgaggaagaaa

SEQ ID NO: 615 - DNA, 147 bp, synthetic construct
  misc_feature 1..147: note = Description of Artificial Sequence: Synthetic polynucleotide
  source 1..147: mol_type = other DNA
acaaggcagcctcgctcgagcgcaggccaatcggctttctagctagagggtttaactcctatttaaaaagaagaacctttgaattctaacggctgagctcttggaagacttgggtccttgggtcgcaggtgggagccgacgggcatc

SEQ ID NO: 616 - DNA, 31 bp, synthetic construct
  misc_feature 1..31: note = Description of Artificial Sequence: Synthetic oligonucleotide
  source 1..31: mol_type = other DNA
cttctgccttttaaaatccagtcccaggaca

SEQ ID NO: 617 - DNA, 294 bp, synthetic construct
  misc_feature 1..294: note = Description of Artificial Sequence: Synthetic polynucleotide
  source 1..294: mol_type = other DNA
gctagctcgggccgggaggagccgcagccggaggagggggaggaggaagaagagaaggaagaggagagggggccgcagtggcgactcggcgctcggaagccgggctcatggacgggtgaggcggcggtgtgcgcagacagtgctccagccgcgcgcgctccccaggccctggcccgggcctcgggccggggaggaagagtagctcgccgaggcgccgaggagagcgggccgccccacagcccgagccggagagggagcgcgagccgcgccggccccggtcgggcctccgaaacc

SEQ ID NO: 618 - DNA, 156 bp, synthetic construct
  misc_feature 1..156: note = Description of Artificial Sequence: Synthetic polynucleotide
  source 1..156: mol_type = other DNA
ctcgccgctgccggggacgggagccgcgcgccaggccgggcggcgggtggcgggctgcgcgccggggttcatgagcctccgggcggcccgcggccccgggagcctgcgccgtgactcaccccccgcccccgcttgtgtctcgtccctcccggcagg

SEQ ID NO: 619 - DNA, 149 bp, synthetic construct
  misc_feature 1..149: note = Description of Artificial Sequence: Synthetic polynucleotide
  source 1..149: mol_type = other DNA
atgggaacgtagaactcgtcatgacacttgtggtaaaataacattattcgcttgcaaaaaacgatgtactttgacaatttaagacacaaaaaaacacaacctcgacaatttaggagttagagaggtcgtgttttgagattagtgagact

SEQ ID NO: 620 - DNA, 485 bp, synthetic construct
  misc_feature 1..485: note = Description of Artificial Sequence: Synthetic polynucleotide
  source 1..485: mol_type = other DNA
acttttggtgggcatttaaaaatgtgtgtgtatgtgtatatatgtatgtgtatgtatgtgtatatatgtatatgtatgtatgtatcgcgtgtatgtgtgtatgtatgcatgtgtatgtatgtatatgcatgtatgtgtatgtgtatatatgtatgtgtgtgtatgtatatgtatgtgtgtgtatgtatatgtgtgtgtatgtgtatgtgtgtgtgtatgtgtgtgtgtatgtatgtatgtatgtatatgtattatacacatatacacatattggtttttttaatcatttgagagttagttgaagataaaaacccatcacccctaaatgtattccaaagaataagaacattgttttatacatagcacacttaacaaaatcaagaaatttaacattaatacagtactgttacctaatccgtagtcgattttcaaattttgtcagttgttccaataatgtcctttatatattccccgcccagctcgag

SEQ ID NO: 621 - DNA, 1137 bp, synthetic construct
  misc_feature 1..1137: note = Description of Artificial Sequence: Synthetic polynucleotide
  source 1..1137: mol_type = other DNA
aaaaaataaaaccctcccccaccacctccttctccccacccctcgccgcaccacacacagcgcgggcttctagcgctcggcaccggcgggccaggcgcgtcctgccttcatttatccagcagcttttcggaaaatgcatttgctgttcggagtttaatcagaagacgattcctgcctccgtccccggctccttcatcgtcccatctcccctgtctctctcctggggaggcgtgaagcggtcccgtggatagagattcatgcctgtgtccgcgcgtgtgtgcgcgcgtataaattgccgagaaggggaaaacatcacaggacttctgcgaataccggactgaaaattgtaattcatctgccgccgccgctgccaaaaaaaaactcgagctcttgagatctccggttgggattcctgcggattgacatttctgtgaagcagaagtctgggaatcgatctggaaatcctcctaatttttactccctctccccccgactcctgattcattgggaactttcaaatcagctataactggagagtgctgaagattgatgggatcgttgccttatgcatttgttttggttttacaaaaaggaaacttgacagaggatcatgctgtacttaaaaaatacaagtaagtctcgcacaggaaattggtttaatgtaactttcaatggaaacctttgagattttttacttaaagtgcattcgagtaaatttaatttccaggcagcttaatacattgtttttagccgtgttacttgtagtgtgtatgccctgctttcactcagtgtgtacagggaaacgcacctgattttttacttattagtttgttttttctttaacctttcagcatcacagaggaagtagactgatattaacaatacttactaataataacgtgcctcatgaaataaagatccgaaaggaattggaataaaaatttcctgcgtctcatgccaagagggaaacaccagaatcaagtgttccgcgtgattgaagacaccccctcgtccaagaatgcaaagcacatccaataaaatagctggattataactcctcttctttctctgggggccgtggggtgggagctggggcgagaggtgccgttggcccccgttgcttttcctctgggaagg

SEQ ID NO: 622 - DNA, 170 bp, synthetic construct
  misc_feature 1..170: note = Description of Artificial Sequence: Synthetic polynucleotide
  source 1..170: mol_type = other DNA
tatttagaattagaatgtttcttagcggtcgtgtagttatttttatgtcataagtggataatttgttagctcctataacaaaagtctgttgcttgtgtttcacattttggatttcctaatataatgttctctttttagaaaaggtggacaagtcctattttcaagagaag

SEQ ID NO: 623 - DNA, 62 bp, synthetic construct
  misc_feature 1..62: note = Description of Artificial Sequence: Synthetic oligonucleotide
  source 1..62: mol_type = other DNA
aaacctttgcatcttctgatagtctagccaaggtccaagaagtagcaagctggcttttggaa

SEQ ID NO: 624 - DNA, 127 bp, synthetic construct
  misc_feature 1..127: note = Description of Artificial Sequence: Synthetic polynucleotide
  source 1..127: mol_type = other DNA
ctcttggtggagcccatattgaaccctgcccatgagcttcaggccatagggagggtgcaccgaattggacagacaaaacctactattgtacacagattcttaattaaagcaacaatagaagaaagaa

SEQ ID NO: 625 - DNA, 211 bp, synthetic construct
  misc_feature 1..211: note = Description of Artificial Sequence: Synthetic polynucleotide
  source 1..211: mol_type = other DNA
gcgctcaatcctttgggaactaaaccggagccagaggaaggggagaatgagtgtcgcctgctaaagaaagtcaagtctgaaaagcaatgatgttgtccactgggcatgtactgaccaatgtggcaggtctgagaacatagctgaagctgaaaataggaaagctgggggcaaggaagagccttgaatcttgaggtgggacgttgactctaag

SEQ ID NO: 626 - DNA, 90 bp, synthetic construct
  misc_feature 1..90: note = Description of Artificial Sequence: Synthetic oligonucleotide
  source 1..90: mol_type = other DNA
aaagacttaaacataagacctaaaaccataaaaaccacagaagaaaacataggcaatgccattcaggacataggcatgggcaaagacttc

SEQ ID NO: 627 - DNA, 75 bp, synthetic construct
  misc_feature 1..75: note = Description of Artificial Sequence: Synthetic oligonucleotide
  source 1..75: mol_type = other DNA
accaacataagacaaagaaacatccagcagctgcctatggcaaaagattacaatgtgtcaaacaagagggcaatg

SEQ ID NO: 628 - DNA, 72 bp, synthetic construct
  misc_feature 1..72: note = Description of Artificial Sequence: Synthetic oligonucleotide
  source 1..72: mol_type = other DNA
gaaatcatcatcaaacggaatcgaatggaatcattgaatggaatggaatggaatcatcatggaatggaaacg

SEQ ID NO: 629 - DNA, 78 bp, synthetic construct
  misc_feature 1..78: note = Description of Artificial Sequence: Synthetic oligonucleotide
  source 1..78: mol_type = other DNA
aaaaggaaatacaagacaacaaacacagaaacacaaccatcgggcatcatgaaacctcgtgaagataatcatcagggt

SEQ ID NO: 630 - DNA, 75 bp, synthetic construct
  misc_feature 1..75: note = Description of Artificial Sequence: Synthetic oligonucleotide
  source 1..75: mol_type = other DNA
gcactagtcagatcaagacagaaagtcaacgaacaaagaacagacttaaactacactctagaacaaatggaccta

SEQ ID NO: 631 - DNA, 96 bp, synthetic construct
  misc_feature 1..96: note = Description of Artificial Sequence: Synthetic oligonucleotide
  source 1..96: mol_type = other DNA
aaaatcaatatgaaaacaaacacaagcagacaaagaaaattgggcaaaaggtttgagcagacacttcaccaaagaagtacaaatggcaaatcagca

SEQ ID NO: 632 - DNA, 54 bp, synthetic construct
  misc_feature 1..54: note = Description of Artificial Sequence: Synthetic oligonucleotide
  source 1..54: mol_type = other DNA
agaaaacacacagacaacaaaaaacacagaacgacaatgacaaaatggccaagc

SEQ ID NO: 633 - DNA, 72 bp, synthetic construct
  misc_feature 1..72: note = Description of Artificial Sequence: Synthetic oligonucleotide
  source 1..72: mol_type = other DNA
agcagccaacaagcatatgaaataatgctccacaacactcatcatcagagaaatgcaaatcaaaaccaaaat

SEQ ID NO: 634 - DNA, 90 bp, synthetic construct
  misc_feature 1..90: note = Description of Artificial Sequence: Synthetic oligonucleotide
  source 1..90: mol_type = other DNA
agaaagaatcaagaggaaatgcaagaaatccaaaacactgtaacagatatgatgaataatgaggtatgcactcatcagcagactcgacat

SEQ ID NO: 635 - DNA, 87 bp, synthetic construct
  misc_feature 1..87: note = Description of Artificial Sequence: Synthetic oligonucleotide
  source 1..87: mol_type = other DNA
agacagtcagacaatcacaaagaaacaagaatgaaaatgaatgaacaaaaccttcaagaaatatgggattatgaagaggccaaatgt

SEQ ID NO: 636 - DNA, 75 bp, synthetic construct
  misc_feature 1..75: note = Description of Artificial Sequence: Synthetic oligonucleotide
  source 1..75: mol_type = other DNA
aacataatccatcaaataaacagaaccaaagacaaaaaccacatgattatctcaatagatgcagaaaaggccttc

SEQ ID NO: 637 - DNA, 80 bp, synthetic construct
  misc_feature 1..80: note = Description of Artificial Sequence: Synthetic oligonucleotide
  source 1..80: mol_type = other DNA
gaatggaattgaaaggaatggaatgcaatggaatggaatgggatggaatggaatgcaatggaatcaactcgattgcaatg

SEQ ID NO: 638 - DNA, 249 bp, synthetic construct
  misc_feature 1..249: note = Description of Artificial Sequence: Synthetic polynucleotide
  source 1..249: mol_type = other DNA
gaagccctcaggagccctggggtgggtctccttgccctgtgaacgctccatttgtgttattgaatccaacataaatgcagcattgtcttcagaggtgagcaatggccgtggccggaggtgcgcatgggatgcaggcggcgtgtgctgctgttgattttctctgctctgctcttagcttactttagcagatagtggagtttcacgtggcagtccggtaaaccaaggcagtgtgaacatcccttccccaca

SEQ ID NO: 639 - DNA, 223 bp, synthetic construct
  misc_feature 1..223: note = Description of Artificial Sequence: Synthetic polynucleotide
  source 1..223: mol_type = other DNA
ttcagaagagaattccccggcagcagcgtggcgctcagcatgttccgtgtctgactgttttgattgtctctcagtccagttgacaaattccttttaagatgaaatttgaattaatttgcagaacttgtacaaatctccaagaaaacagcttaaggaacagattaaagaatgaatgccttaggaattaaagcattaatagctcttgagtagactggatggaaag

SEQ ID NO: 640 - DNA, 128 bp, synthetic construct
  misc_feature 1..128: note = Description of Artificial Sequence: Synthetic polynucleotide
  source 1..128: mol_type = other DNA
agagccgccctgtccgcgccgcgcctcggcagccggaacagggccgccgtcggggagccccaacacacggtccacagctcatcatgatggacttggagctgccgccgccgggactcccgtcccagcag

SEQ ID NO: 641 - DNA, 277 bp, synthetic construct
  misc_feature 1..277: note = Description of Artificial Sequence: Synthetic polynucleotide
  source 1..277: mol_type = other DNA
ggccatgcagcgacggccgccgcggagctccgagcagcggtagcgcccccctgtaaagcggttcgctatgccggggccactgtgaaccctgccgcctgccggaacactcttcgctccggaccagctcagcctctgataagctggactcggcacgcccgcaacaagcaccgaggagttaagagagccgcaagcgcagggaaggcctccccgcacgggtgggggaaagcggccggtgcagcgcggggacaggcactcgggctggcactggctgctaggg

SEQ ID NO: 642 - DNA, 398 bp, synthetic construct
  misc_feature 1..398: note = Description of Artificial Sequence: Synthetic polynucleotide
  source 1..398: mol_type = other DNA
gacaggaggaaacgcagcgccagcagcatctcatctaccctccttgacacctccccgtggctccagccagaccctagaggtcagccttgcggaccaacaggaggactcccagctttcccttttcaagaggtccccagacaccggccaccctcttccagcccctgcggccagtgcaaggaggcaccaatgctctgaggctgtcgcgtggtgcagcgtcgagcatcctcgccgaggtcctttctgctgcctgtcccgcctcaccccgctccatcacaccagctggccctctttgcttccttttcccagaatcgttaagccccgactcccactagcacctcgtaccaacctcgccccaccccatcctcctgccttcccgcgctccggtgtcccccgctgcc

SEQ ID NO: 643 - DNA, 28 bp, synthetic construct
  misc_feature 1..28: note = Description of Artificial Sequence: Synthetic oligonucleotide
  source 1..28: mol_type = other DNA
tgaaaatttttccttacaaacagatatg

SEQ ID NO: 644 - DNA, 393 bp, synthetic construct
  misc_feature 1..393: note = Description of Artificial Sequence: Synthetic polynucleotide
  source 1..393: mol_type = other DNA
gaccggtcagcggactcaccggccagggcgctcggtgctggaatttgatattcattgatccgggttttatccctcttcttttttcttaaacatttttttttaaaactgtattgtttctcgttttaatttatttttgcttgccattccccacttgaatcgggccgacggcttggggagattgctctacttccccaaatcactgtggattttggaaaccagcagaaagaggaaagaggtagcaagagctccagagagaagtcgaggaagagagagacggggtcagagagagcgcgcgggcgtgcgagcagcgaaagcgacaggggcaaagtgagtgacctgcttttgggggtgaccgccggagcgcggcgtgagccctcccccttgggatcccgc

SEQ ID NO: 645 - DNA, 165 bp, synthetic construct
  misc_feature 1..165: note = Description of Artificial Sequence: Synthetic polynucleotide
  source 1..165: mol_type = other DNA
cgcggtgcccgcggttgcaacgggatcccgggcgctgcagcttgggaggcggctctccccaggcggcgtccgcggagacacccatccgtgaaccccaggtcccgggccgccggctcgccgcgcaccaggggccggcggacagaagagcggccgagcggctcgagg

SEQ ID NO: 646 - DNA, 665 bp, synthetic construct
  misc_feature 1..665: note = Description of Artificial Sequence: Synthetic polynucleotide
  source 1..665: mol_type = other DNA
ggtgctggaggaggaaaccggcggagcagcttccccactctcagttgcgcttctggcgatggcgatcagaggtcctgctgcgctctccgccgcgctctacctccattagccgcgctgcgcggtgctgcgccctcgccggtgcctctctcctgggtcccaggatcggcccccaccatccaggcacgacccccttccccggcccctcggcctttcccccaactcggccatctccgacccggggcgcgtgttccccccggcccggcgccttctctccctccgggggcacccgctccctagccccggcccggccctccccgcggcgcagcacggagtctcggcgtcccatggcgcaacctacggcctcggcccagaagctggtgcggccgatccgcgccgtgtgccgcatcctgcagatcccggagtccgacccctccaacctgcggccctagagcgcccccgccgccccgggggaaggagagcgcgagcgcgctgagcagacagagcgggagaacgcgtcctcgcccgccggccgggaggccccggagctggcccatggggagcaggcgcccggtgccggccacgacgaccgccaccgcccgcgccgcgaccggccggtgaagcccagggacccccctctgggagagccccatgagggcaggagagtg

SEQ ID NO: 647 - DNA, 139 bp, synthetic construct
  misc_feature 1..139: note = Description of Artificial Sequence: Synthetic polynucleotide
  source 1..139: mol_type = other DNA
cttttttagcgccatctgctcgcggcgccgcctcctgctcctcccgctgctgctgccgctgccgccctgagtcactgcctgcgcagctccggccgcctggctccccatactagtcgccgatatttggagttcttacaac

SEQ ID NO: 648 - DNA, 80 bp, synthetic construct
  misc_feature 1..80: note = Description of Artificial Sequence: Synthetic oligonucleotide
  source 1..80: mol_type = other DNA
atcttcttggagcgctttaggctggccggcggcgctgggaggtggagtcgttgctgttgctgtttgtgagcctgtggcgc

SEQ ID NO: 649 - DNA, 348 bp, synthetic construct
  misc_feature 1..348: note = Description of Artificial Sequence: Synthetic polynucleotide
  source 1..348: mol_type = other DNA
aggaatgcgggatcctggggttccccgcacgtggctggtgcccaggcagttccgcggttgcttagagacgggactgtggctgccctcatccccattgcgtcttttttttttttttttttttttacctccaccgccttctagtctcaccgaaggcttgtggccatctctgtaaagtttctggggaggtgggcacggggtaaacgccggagggttctgtggagcctatgggactgactggaggccaaagaactttgggccgcagatgtacaccagcgtcactcttttggtctgttagggccttcatcgctcacatcaggtttcagtgtgaaacgggaaaacatagccgca

SEQ ID NO: 650 - DNA, 120 bp, synthetic construct
  misc_feature 1..120: note = Description of Artificial Sequence: Synthetic polynucleotide
  source 1..120: mol_type = other DNA
ctgcccaccgggcccaccgcgccgccaccccgaccccgctgcgcacggcctgtccgctgcacaccagcttgttggcgtcttcgtcgccgcgctcgccccgggctactcctgcgcgccaca

SEQ ID NO: 651 - DNA, 181 bp, synthetic construct
  misc_feature 1..181: note = Description of Artificial Sequence: Synthetic polynucleotide
  source 1..181: mol_type = other DNA
agccctctctcccgccgcccgcccgccacccgccagcccaggtgcccgcccgccagtcagctagtccgtcggtccgcgcgtccctctgtcccggagcccgcagatcgcgacccagagcgcgcggggccgagagccgagagacagtcccgggcgcagcgcggagctccgggccccgagatcc

SEQ ID NO: 652 - DNA, 159 bp, synthetic construct
  misc_feature 1..159: note = Description of Artificial Sequence: Synthetic polynucleotide
  source 1..159: mol_type = other DNA
cggccccagaaaacccgagcgagtagggggcggcgcgcaggagggaggagaactgggggcgcgggaggctggtgggtgtggggggtggagatgtagaagatgtgacgccgcggcccggcgggtgccagattagcggacgcggtgcccgcggttgcaacg

SEQ ID NO: 653 - DNA, 190 bp, synthetic construct
  misc_feature 1..190: note = Description of Artificial Sequence: Synthetic polynucleotide
  source 1..190: mol_type = other DNA
gcctggcgcgcagagtgcaccttcctgagctcgagcggtccagcgccaagttcggggtttggggttggagcggctggtcacgtggctggcccgcggcggtgcgcggggcgttgggtcagcgggtctgggactggtggcaccggcggcggcgtaggacggaggcgtcgctaggcagcttcgaaccagtgca

SEQ ID NO: 654 - DNA, 257 bp, synthetic construct
  misc_feature 1..257: note = Description of Artificial Sequence: Synthetic polynucleotide
  source 1..257: mol_type = other DNA
acaaggcagcctcgctcgagcgcaggccaatcggctttctagctagagggtttaactcctatttaaaaagaagaacctttgaattctaacggctgagctcttggaagacttgggtccttgggtcgcaggtgggagccgacggggtctcactccattgcccaggccagagtgcggggatatttgataagaaacttcagtgaaggccgggcgcggtggctcatgcccgtaatcccagcattttcggaggccgaggcatc

SEQ ID NO: 655 - DNA, 107 bp, synthetic construct
  misc_feature 1..107: note = Description of Artificial Sequence: Synthetic polynucleotide
  source 1..107: mol_type = other DNA
cctgccctggtgaaaatgcttggttcaccagtggattctgtgttgttttatgccattacaactctccacaaccttttattacatcaagaaggagctaaaatggcagt

SEQ ID NO: 656 - DNA, 231 bp, synthetic construct
  misc_feature 1..231: note = Description of Artificial Sequence: Synthetic polynucleotide
  source 1..231: mol_type = other DNA
gtcatatctccgtacctcacttcctgacacaaacaagttttcactgttgtcagcaacaaagccctaatatagctgcggaagagaaaaactgcattgcattttgcctcctgcaagcatcatcaacagttactggaggaacgtaattccagaaagcttgaaagccgtggtgatggtaattatgtatcaaatgcctggttctatttctgttattattgttttgtcatttctgtt

SEQ ID NO: 657 - DNA, 167 bp, synthetic construct
  misc_feature 1..167: note = Description of Artificial Sequence: Synthetic polynucleotide
  source 1..167: mol_type = other DNA
atatagagacgtttccgcctcctgcttgaaactaacccctctttttctccaaaggagtgcttgtggagatcggatcttttctccagcaattgggggaaagaaggctttttctctgaattagcttagtgtaaccagcggcgtatattttttaggcgccttttcgaaaa

SEQ ID NO: 658 - DNA, 240 bp, synthetic construct
  misc_feature 1..240: note = Description of Artificial Sequence: Synthetic polynucleotide
  source 1..240: mol_type = other DNA
cctcccctggggaggctcgcgttcccgctgctcgcgcctgcgccgcccgccggcctcaggaacgcgccctcttcgccggcgcgcgccctcgcagtcaccgccacccaccagctccggcaccaacagcagcgccgctgccaccgcccaccttctgccgccgccaccacagccaccttctcctcctccgctgtcctctcccgtcctcgcctctgtcgactatcaggtgaactttgaaccagg

SEQ ID NO: 659 - DNA, 81 bp, synthetic construct
  misc_feature 1..81: note = Description of Artificial Sequence: Synthetic oligonucleotide
  source 1..81: mol_type = other DNA
tcttcaaattggaattatagaaagtagagggagggatagtctaccgtctctcactggattggtgccacctaaaacattgtt

SEQ ID NO: 660 - DNA, 202 bp, synthetic construct
  misc_feature 1..202: note = Description of Artificial Sequence: Synthetic polynucleotide
  source 1..202: mol_type = other DNA
agagaaggcctcgcacaaaacactgtacaaacccgaaaggaagtctgagagacgaaccgccttcctccctgaagcttctagaactggagcagaaagaaggtgtggcccagggccagccccgcctcctccccgggcggaagctgtgtcagttgccggaagtcggcgtgaggtggggcttatgcggcggcgtggtgaaatagat

SEQ ID NO: 661 - DNA, 169 bp, synthetic construct
  misc_feature 1..169: note = Description of Artificial Sequence: Synthetic polynucleotide
  source 1..169: mol_type = other DNA
ggcgccgcggggccgcgcgtccaggcggcgagcggaagtgggtgtgagagcggaagtggccggctagagccgggggctgggcggggaccgggcttgtcggtgaagcggcagtggcggcggcggcggcggctcggcaggcgggttcaggcttcgggggccagccgccgcc

SEQ ID NO: 662 - DNA, 99 bp, synthetic construct
  misc_feature 1..99: note = Description of Artificial Sequence: Synthetic oligonucleotide
  source 1..99: mol_type = other DNA
tggagttggggagttgcctggagggcgggagggaggcggcggaggaagagggcgagcctgaggtgaaaaagcggcgacttctgtgtgtggagtttgcct

SEQ ID NO: 663 - DNA, 188 bp, synthetic construct
  misc_feature 1..188: note = Description of Artificial Sequence: Synthetic polynucleotide
  source 1..188: mol_type = other DNA
gcgcccgccgtgtgagcagcagcagcggctggtctgtcaaccggagcccgagcccgagcagcctgcggccagcagcgtcctcgcaagccgagcgcccaggcgcgccaggagcccgcagcagcggcagcagcgcgccgggccgcccgggaagcctccgtccccgcggcggcggcggcggcggcggcaac

SEQ ID NO: 664 - DNA, 100 bp, synthetic construct
  misc_feature 1..100: note = Description of Artificial Sequence: Synthetic polynucleotide
  source 1..100: mol_type = other DNA
gacagctcaagggactcagccaactggctcacgcctccccttcagcttctcttcacgcactccaagatctaaaccgagaatcgaaactaagctggggtcc

SEQ ID NO: 665 - DNA, 263 bp, synthetic construct
  misc_feature 1..263: note = Description of Artificial Sequence: Synthetic polynucleotide
  source 1..263: mol_type = other DNA
aggagaaggagaaggaggaggactaggaggaggaggacggcgacgaccagaaggggcccaagagagggggcgagcgaccgagcgccgcgacgcggaagtgaggtgcgtgcgggctgcagcgcagaccccggcccggcccctccgagagcgtcctgggcgctccctcacgccttgccttcaagccttctgcctttccaccctcgtgagcggagaactgggagtggccattcgacgacagtgtggtgtaaaggaattcattagcc

SEQ ID NO: 666 - DNA, 368 bp, synthetic construct
  misc_feature 1..368: note = Description of Artificial Sequence: Synthetic polynucleotide
  source 1..368: mol_type = other DNA
gtcacttcctgccgggctgcgggcgcctgagcggctcttcagcgtttgcgccggcggctgccgcgtctctctcggctcccgcttcctttgaccgcctcccccccccggcccggcggcgcccgcctcctccacggccactccgcctcttccctcccttcgtcccttcttcctctcccttttttccttcttccttcccctcctcgccgccaccgcccaggaccgccggccgggggacgagctcggagcagcagccagagtttattaaccacttaacctctcagaactgaacaaagacaacattgttcctggaacgccctctttttaaaaaagaaagcataacccctactgtagaactaaatgcactgtgc

SEQ ID NO: 667 - DNA, 293 bp, synthetic construct
  misc_feature 1..293: note = Description of Artificial Sequence: Synthetic polynucleotide
  source 1..293: mol_type = other DNA
gtcacttcctgccgggctgcgggcgcctgagcggctcttcagcgtttgcgccggcggctgccgcgtctctctcggctcccgcttcctttgaccgcctcccccccccggcccggcggcgcccgcctcctccacggccactccgcctcttccctcccttcgtcccttcttcctctcccttttttccttcttccttcccctcctcgccgccaccgcccaggaccgccggccgggggacgagctcggagcagcagccagaaagcataacccctactgtagaactaaatgcactgtgc

SEQ ID NO: 668 - DNA, 339 bp, synthetic construct
  misc_feature 1..339: note = Description of Artificial Sequence: Synthetic polynucleotide
  source 1..339: mol_type = other DNA
gtcacttcctgccgggctgcgggcgcctgagcggctcttcagcgtttgcgccggcggctgccgcgtctctctcggctcccgcttcctttgaccgcctcccccccccggcccggcggcgcccgcctcctccacggccactccgcctcttccctcccttcgtcccttcttcctctcccttttttccttcttccttcccctcctcgccgccaccgcccaggaccgccggccgggggacgagctcggagcagcagccaggtagaactttagacttcatagcactgaattaacctgcactgaaagctgtttacctgcatttgttcacttttgttgaaagtgacc

SEQ ID NO: 669 - DNA, 451 bp, synthetic construct
  misc_feature 1..451: note = Description of Artificial Sequence: Synthetic polynucleotide
  source 1..451: mol_type = other DNA
gtcacttcctgccgggctgcgggcgcctgagcggctcttcagcgtttgcgccggcggctgccgcgtctctctcggctcccgcttcctttgaccgcctcccccccccggcccggcggcgcccgcctcctccacggccactccgcctcttccctcccttcgtcccttcttcctctcccttttttccttcttccttcccctcctcgccgccaccgcccaggaccgccggccgggggacgagctcggagcagcagccagagtttattaaccacttaacctctcagaactgaacaaagacaacattgttcctggaacgccctctttttaaaaaaggtagaactttagacttcatagcactgaattaacctgcactgaaagctgtttacctgcatttgttcacttttgttgaaagtgaccatgtctcaagttcaagtgcaagttcagaacccatctg

SEQ ID NO: 670 - DNA, 537 bp, synthetic construct
  misc_feature 1..537: note = Description of Artificial Sequence: Synthetic polynucleotide
  source 1..537: mol_type = other DNA
gtcacttcctgccgggctgcgggcgcctgagcggctcttcagcgtttgcgccggcggctgccgcgtctctctcggctcccgcttcctttgaccgcctcccccccccggcccggcggcgcccgcctcctccacggccactccgcctcttccctcccttcgtcccttcttcctctcccttttttccttcttccttcccctcctcgccgccaccgcccaggaccgccggccgggggacgagctcggagcagcagccaggtggagttttgctcttgtcgcccaggctggagtgcagtggcgtgatctcggctcactgcaacctccacctcccaggttcaagcgattttcccacttcagcctcccgataagctgagattacagagtttattaaccacttaacctctcagaactgaacaaagacaacattgttcctggaacgccctctttttaaaaaaggtagaactttagacttcatagcactgaattaacctgcactgaaagctgtttacctgcatttgttcacttttgttgaaagtgacc

SEQ ID NO: 671 - DNA, 381 bp, synthetic construct
  misc_feature 1..381: note = Description of Artificial Sequence: Synthetic polynucleotide
  source 1..381: mol_type = other DNA
gccggagcggccaggccgccgtctgcccgtcccgctggacgtcccgcggtccgccctcccgtgcgtccgtctgccggtgagcccgcccgcccgccggcccagaacagagaacagaagctcagagaagtgaagcaacttgcccagctatgagagacagagccaggatttgaaaccagatgaggacgctgaggcccagagagggaaagccacttgcctagggacacacagcggggagaggtggagcagggcctctatttcgagacccctgactccacacctggtgtttgtgccaagaccccaggctgcctcccaggtcctctgggacagcccctgccttctaccaggaccatgggtagcaacaagagcaagcccaaggatgcc

SEQ ID NO: 672 - DNA, 336 bp, synthetic construct
  misc_feature 1..336: note = Description of Artificial Sequence: Synthetic polynucleotide
  source 1..336: mol_type = other DNA
aggtttcagtagcggcgctgcgcgcaggccgggaacacgaggccaagagccgcagccccagccgccttggtgcagcgtacaccggcactagcccgcttgcagccccaggattagacagaagacgcgtcctcggcgcggtcgccgcccagccgtagtcacctggattacctacagcggcagctgcagcggagccagcgagaaggccaaaggggagcagcgtcccgagaggagcgcctcttttcagggaccccgccggctggcggacgcgcgggaaagcggcgtcgcgaacagagccagattgagggcccgcgggtggagagagcgacgcccgagggg

SEQ ID NO: 673 - DNA, 213 bp, synthetic construct
  misc_feature 1..213: note = Description of Artificial Sequence: Synthetic polynucleotide
  source 1..213: mol_type = other DNA
gtgtgaatgcttcattcgcctcacaaacaaccacagaaccacaagtgcggtgcaaactttctccaggaggacagcaagaagtctctggtttttaaatggttaatctccgcaggtcactaccagccaccgagaccaacagagtcatttaaggctgcaagcagtatttacaacagagggtacaagttctatctgaaaaaaaaaggagggactatg

SEQ ID NO: 674 - DNA, 105 bp, synthetic construct
  misc_feature 1..105: note = Description of Artificial Sequence: Synthetic polynucleotide
  source 1..105: mol_type = other DNA
atgagcaaggcgtttgggctcctgaggcaaatctgtcagtccatcctggctgagtcctcgcagtccccggcagatcttgaagaaaagaaggaagaagacagcaac

SEQ ID NO: 675 - DNA, 212 bp, synthetic construct
  misc_feature 1..212: note = Description of Artificial Sequence: Synthetic polynucleotide
  source 1..212: mol_type = other DNA
agggccagacgttcttcgccgagagtcgtcggggtttcctgcttcaacagtgcttggacggaacccggcgctcgttccccaccccggccggccgcccatagccagccctccgtcacctcttcaccgcaccctcggactgccccaaggcccccgccgccgctccagcgccgcgcagccaccgccgccgccgccgcctctccttagtcgccgcc

SEQ ID NO: 676 - DNA, 140 bp, synthetic construct
  misc_feature 1..140: note = Description of Artificial Sequence: Synthetic polynucleotide
  source 1..140: mol_type = other DNA
gctccgccattcgcgggaaggcgtttgtggtgccagagaaaagtagccagagcggcgcagtggcggccgcgttctgtggttttccgctattcccccagacccgcaccttctcggcctctttgcggagaatcgtgaccaag

SEQ ID NO: 677 - DNA, 319 bp, synthetic construct
  misc_feature 1..319: note = Description of Artificial Sequence: Synthetic polynucleotide
  source 1..319: mol_type = other DNA
actaggactcaagatggccaccgcgcccgctagtcatctcgctagcccgcgcgccagtgagctggcacgagacacgcggtggcccacggcgtctggggacgatctccagcccttcgcacggggcggagcgcccgccttccctccaatcagcacgccgggccggctagccaggggccgcccgcgcgcggggtgtgtgaggacgcgctcccagtcgctgagtgcctgagccgggaagcagttgctgtggtacctgctgctgcccgagcggacgtagagcatcggacgcgggcgccgtggcgctgggcaggagggcgaagcc

SEQ ID NO: 678 - DNA, 186 bp, synthetic construct
  misc_feature 1..186: note = Description of Artificial Sequence: Synthetic polynucleotide
  source 1..186: mol_type = other DNA
tgcggccgggggaacccagtttccgaggaacttttcgccggcgccgggccgcctctgaggccagggcaggacacgaacgcgcggagcggcggcggcgactgagagccggggccgcggcggcgctccctaggaagggccgtacgaggcggcgggcccggcgggcctcccggaggaggcggctgcgcc

SEQ ID NO: 679 - DNA, 1014 bp, synthetic construct
  misc_feature 1..1014: note = Description of Artificial Sequence: Synthetic polynucleotide
  source 1..1014: mol_type = other DNA
attctgaattatttccgcgatgcctggaacatcttcgactttgtgactgttctgggcagcatcaccgatatcctcgtgactgagtttgggaataacttcatcaacctgagctttctccgcctcttccgagctgcccggctcatcaaacttctccgtcagggttacaccatccgcattcttctctggacctttgtgcagtccttcaaggccctgccttatgtctgtctgctgatcgccatgctcttcttcatctatgccatcattgggatgcaggtgtttggtaacattggcatcgacgtggaggacgaggacagtgatgaagatgagttccaaatcactgagcacaataacttccggaccttcttccaggccctcatgcttctcttccggagtgccaccggggaagcttggcacaacatcatgctttcctgcctcagcgggaaaccgtgtgataagaactctggcatcctgactcgagagtgtggcaatgaatttgcttatttttactttgtttccttcatcttcctctgctcgtttctgatgctgaatctctttgtcgccgtcatcatggacaactttgagtacctcacccgagactcctccatcctgggcccccaccacctggatgagtacgtgcgtgtctgggccgagtatgaccccgcagcttggggccgcatgccttacctggacatgtatcagatgctgagacacatgtctccgcccctgggtctggggaagaagtgtccggccagagtggcttacaagcggcttctgcggatggacctgcccgtcgcagatgacaacaccgtccacttcaattccaccctcatggctctgatccgcacagccctggacatcaagattgccaagggaggagccgacaaacagcagatggacgctgagctgcggaaggagatgatggcgatttggcccaatctgtcccagaagacgctagacctgctggtcacacctcacaagtccacggacctcaccgtggggaagatctacgcagcc

SEQ ID NO: 680 - DNA, 63 bp, synthetic construct
  misc_feature 1..63: note = Description of Artificial Sequence: Synthetic oligonucleotide
  source 1..63: mol_type = other DNA
gtgtccctgcagctgcgcggaggccacttctgcggcgccaccctgattgcgcccaacttcgtc

SEQ ID NO: 681 - DNA, 95 bp, synthetic construct
  misc_feature 1..95: note = Description of Artificial Sequence: Synthetic oligonucleotide
  source 1..95: mol_type = other DNA
gtaagggaggggagttggatatacctcgcctaatatctcctgggttgacaccatcattattgtttattcttgtgctccaaaagccgagtcctctg

SEQ ID NO: 682 - DNA, 98 bp, synthetic construct
  misc_feature 1..98: note = Description of Artificial Sequence: Synthetic oligonucleotide
  source 1..98: mol_type = other DNA
ttttaactaggttatttataatgtatttctgaaccacttggcagacaaattcacaacacttaatgttcatattttgagtaaaggaagctaaaaccatg

SEQ ID NO: 683 - DNA, 518 bp, synthetic construct
  misc_feature 1..518: note = Description of Artificial Sequence: Synthetic polynucleotide
  source 1..518: mol_type = other DNA
gtcgccgctgcagctccgggggctcccaggggagcgtgcgcggaacctccaggcccagcaggaccccggctgcggcgaggaggaaggagccagcctagcagcttctgcgcctgtggccgcgggtgtcctggaggcctctcggtgtgacgagtgggggacccgaaggctcgtgcgccacctccaggcctggacgctgccctccgtcttctgcccccaataggtgcgccggaccttcaggccctggggtgaattcagctgctcctacatcagcttccggaaccaccaaaaattcaaattgggattttccggagtaaacaagagcctagagccctttgctcaatgctggatttaatacgtatatatttttaagcgagttggttttttcccctttgatttttgatcttcgcgacagttcctcccacgcatattatcgttgttgccgtcgttttctctccccgcgtggctccttgacctgcgagggagagagaggacaccgaagccgggagctcgcagggacc

SEQ ID NO: 684 - DNA, 94 bp, synthetic construct
  misc_feature 1..94: note = Description of Artificial Sequence: Synthetic oligonucleotide
  source 1..94: mol_type = other DNA
gaggcctagagccacatggttcagtccccgcctctgggcctctgtggggacagcctcacccttaagctagtcccttctcccctttgcagacgag

SEQ ID NO: 685 - DNA, 147 bp, synthetic construct
  misc_feature 1..147: note = Description of Artificial Sequence: Synthetic polynucleotide
  source 1..147: mol_type = other DNA
agtttcctcggcagcggtaggcgagagcacgcggaggagcgtgcgcgggggccccgggagacggcggcggtggcggcgcgggcagagcaaggacgcggcggatcccactcgcacagcagcgcactcggtgccccgcgcagggtcgcg

SEQ ID NO: 686 - DNA, 278 bp, synthetic construct
  misc_feature 1..278: note = Description of Artificial Sequence: Synthetic polynucleotide
  source 1..278: mol_type = other DNA
gcggccgcgggctcccgctaaccgcagcctccactcctctccccgcgcgccgcgcccccgccccgccccgcccggtctcgccggccgagcgtccgttggtccttgagcgcgtccgacagtctgtctgttcgcgatcctgccggagccccgccgccgccggcttggattctgaaaccttccttgtatccctcctgagacatctttgctgcaagatcgaggctgtcctctggtgagaaggtggtgaggcttcccgtcatattccagctctgaacagcaac

SEQ ID NO: 687 - DNA, 335 bp, synthetic construct
  misc_feature 1..335: note = Description of Artificial Sequence: Synthetic polynucleotide
  source 1..335: mol_type = other DNA
aggggacgcagcgaaaccggggcccgcgccaggccagccgggacggacgccgatgcccggggctgcgacggctgcagagcgagctgccctcggaggccggcgtggggaagatggcccagtccaccgccacctcccctgatgggggcaccacgtttgagcacctctggagctctctggaaccagacagcacctacttcgaccttccccagtcaagccgggggaataatgaggtggtgggcggaacggattccagcatggacgtcttccacctggagggcatgactacatctgtcatggcccagttcaatctgctgagcagcaccatggaccagatg

SEQ ID NO: 688 - DNA, 160 bp, synthetic construct
  misc_feature 1..160: note = Description of Artificial Sequence: Synthetic polynucleotide
  source 1..160: mol_type = other DNA
ggctgcctcgcaggggctgcgcgcagcggcaagaagtgtctgggctgggacggacaggagaggctgtcgccatcggcgtcctgtgcccctctgctccggcacggccctgtcgcagtgcccgcgctttccccggcgcctgcacgcggcgcgcctgggtaac

SEQ ID NO: 689 - DNA, 194 bp, synthetic construct
  misc_feature 1..194: note = Description of Artificial Sequence: Synthetic polynucleotide
  source 1..194: mol_type = other DNA
gcttggtgctgcatctcaatccctgtggccccaggagcagctgcggcaggaacatgtatggatttatcaacacctgtctgcaatctcttgtgatagagaaatttggtgaagaaacatgggaaaaattgaagtgtctccatggaagccatcctgaaactctttggagaatactttcaattctgaagatgtctggc

SEQ ID NO: 690 - DNA, 177 bp, synthetic construct
  misc_feature 1..177: note = Description of Artificial Sequence: Synthetic polynucleotide
  source 1..177: mol_type = other DNA
gacagggactggaagagaggacgcggtcgagtaggtgtgcaccagccctggcaacgagagcgtctaccccgaactctgctggccttgaggtggggaagccggggagggcagttgaggaccccgcggaggcgcgtgactggttgagcgggcaggccagcctccgagccgggtggacac

SEQ ID NO: 691 - DNA, 174 bp, synthetic construct
  misc_feature 1..174: note = Description of Artificial Sequence: Synthetic polynucleotide
  source 1..174: mol_type = other DNA
caggtgttgcggccccgcagcgcccgcgcgctcctctccccgactcggagcccctcggcggcgcccggcccaggacccgcctaggagcgcaggagccccagcgcagagaccccaacgccgagacccccgccccggccccgccgcgcttcctcccgacgcagagcaaaccgccca

SEQ ID NO: 692 - DNA, 279 bp, synthetic construct
  misc_feature 1..279: note = Description of Artificial Sequence: Synthetic polynucleotide
  source 1..279: mol_type = other DNA
tccagcggtccaatcgagaagtaagtagtccgagctgcgagcataactctaccagagaaacgcgcactttattggtcaagacagacggaagccggcggttggacgcaaaggttgactcggaagctgagagattgttgagtaacacgcagaagtcttgaaagtatcaagtattgaacatatttcaagggacttggtttcggtgaagtcgtcaattccttttatcgtcaacgtttccacagccctcagaatagaaatttccaacaagccaaagcctacgta

SEQ ID NO: 693 - DNA, 365 bp, synthetic construct
  misc_feature 1..365: note = Description of Artificial Sequence: Synthetic polynucleotide
  source 1..365: mol_type = other DNA
ttaagatactttttctaaaaagatttatttccagagtgttcccatgttggtttaaaattcactgttttcaacattttagagcaatacctcatctacttgattttgtgtctgctgaagtcttcggttgctgccagaggcagcacttgaccctggggttgcacctgcagacctgaaatgggtaaaggcacaagcatgagtaaactatgattccagatacattttttataagtatgaagacattatcccaaggcatcactgtttaaaggttcagaacttaagcagaaaaagaaacccttcctacagtaaggaacaaaggttctaatgacatttcttctaattcctctataatttccaggattcatcat

SEQ ID NO: 694 - DNA, 1730 bp, synthetic construct
  misc_feature 1..1730: note = Description of Artificial Sequence: Synthetic polynucleotide
  source 1..1730: mol_type = other DNA
ttcagttgtgaatgaatggacgtgccaaatagacgtgccgccgccgctcgattcgcactttgctttcggttttgccgtcgtttcacgcgtttagttccgttcggttcattcccagttcttaaataccggacgtaaaaatacactctaacggtcccgcgaagaaaaagataaagacatctcgtagaaatattaaaataaattcctaaagtcgttggtttctcgttcactttcgctgcctgctcaggacgagggccacaccaagaggcaagagaaacaaaaagagggaacataggaacaggaaccagataatagtgacataagcgaccctttcgcaaatattttggcgcaaaatgagcgggcgccaagtgccgcgtggtggagccgcctgaaaatgacatggaaaattcgccgaaaatcgcgcgttttggcagcatcaatcccaaagcacaaaattaatttctatcataatttctgggtgcaacacggacccataattgaatcgaatatagggcttatctgatagcccggcagcaacattgaactttccggctgcaaaggagacgacaccgagatcgccaattttcgttgggctcgttctctgggctccggcgataagaaatccatgctgataaggacaggaggacggtctgcggcaaattgaattcgattctgacctgtatgaaagccagcggagatacggatacctctgggtttatgggtagaaaacgcagagcgtcgcgccaacatcgaaattatttgcgtttgcatcttctcgtcctttcgtttatcgttctgattgccatcgtggtggcgcggtttctattaattttgcttctgtatcgtttgcaaaatctcaaaagattcaaaaagttcgtcatcagcagccgcaacacaaaaaccaacgagtgtaaagccgagcatacaaatatcaataaaaacataaacatttacccaatctcaatctcaaaacattcgcatcgtttccacacaaatatgcttagttcgcccaaattgtgattgtatatatatatttaacggcattaaatacaaaagattaagccctaaattaagtgtaaatcttacaaaacgtctacgtttttaaacaagaaattgtgatattatatattaatcgggaaattcgaagtatgagaacaaaacggtgtatatatgtaagtgggcgatgaacatcaatgaatattttagctgagcaaagtacacacgaatgaatataaatatacatgaaaatatattttgggcaccgacttttacaccacaattatatatcgatagaaaagacacgaaaacaatcacagaaaactaagagtttcaaaatcaaaattgaggaataccaactagaggataaggctacttaaggatcaaaaaacaccaaggagacgagattttctaccaaatcgagagacgaggggcaggttaatttcgtcatttttggccaagacagcaaatagaggaacagcaaagcgaaaatcattttatacctcacacaacaactacacactaactaagattaggctacgcaactgtacattgtacttaagtgttcaaagtatatttagtttactttgtatataagaaaagtagctaaaagcacgcggacagggaggcaggagcaccacagtcactagccactaagcagagtcacagtcacgatcacgttcactccaggatcaggactcggggcgggatcagcagacgctgaggaagctgccacg

SEQ ID NO: 695 - DNA, 255 bp, synthetic construct
  misc_feature 1..255: note = Description of Artificial Sequence: Synthetic polynucleotide
  source 1..255: mol_type = other DNA
tcaattctattcaaacaagtaaagtgaacacatcgctaagcgaaagctaagcaaacaaacaagcgcagctgaacaagctaaacaatctgcaataaagtgcaagttaaagtgaatcaattaaaagtaaccaacaaccaagtaattaaactaaaaactgcaactactgaaatcaaccaagaagtaattattgaagacaagaagagaactctgaatactttcaacaagtcgttaccgaggaagaagaactcacacaca

SEQ ID NO: 696 - DNA, 149 bp, synthetic construct
  misc_feature 1..149: note = Description of Artificial Sequence: Synthetic polynucleotide
  source 1..149: mol_type = other DNA
agtcttgaaaaaaatttcgtacggtgtgcgtcgtaacaacaagcagcgtctgaaaagttttgtgaatttccaattctatacaaagcaaagtgaaaatatctgtatttttacctttattctgtgaatagaacgaaaaacatacatacaag

SEQ ID NO: 697 - DNA, 200 bp, synthetic construct
  misc_feature 1..200: note = Description of Artificial Sequence: Synthetic polynucleotide
  source 1..200: mol_type = other DNA
ccatcgcagcgaacgcatctcgaaaaaatcattgaataagagagacaccagaacaaagtgaacgaactcgaaaatacgaaagaaaagtgtgtgcgccagcaacaaagaactaactcgataaatattcattgtgcagaagagaaagttattgagtcactaccagttgtgtaattccgaacgagaagaaagataaaccaaca

SEQ ID NO: 698 - DNA, 963 bp, synthetic construct
  misc_feature 1..963: note = Description of Artificial Sequence: Synthetic polynucleotide
  source 1..963: mol_type = other DNA
acattcgttcgatggcaacggattggataacaggcgcgcgctttgttttattatccacattatcagcggcattattgttattattggccctcagcgctttaccgctcgcccacgcgtccgcccgtgaatgccgcgcggaaaagtcgctttccactagattggcgtccagattcgaggaaatccgtcagcagacgcattcgcgcccgttcggtcagcactatggctaataatcgttcaaatcgttaaaaccataaaaataataataataattgcaataacaataaacatagtaataatcgtaacgcttacgagcctttgatagtgccaaggcaagcgcaatccaagtattcaaattcgaattcaattaacagcaaagtgcaattggctaaaaaccgaaaccaaaacgcaacaaagtatacgaaacacttgtgaaaccgtacaaacaattgtggaaaaaaatttaaagattattaagattgaagtctcaataaacattagtgcttaaataaatttaaaacgacccgcgtggagagtgcaataaaaagaataacttttgaaataaatatttaccaaacagaaaaatattttataaatatttaaataagtgaaaaacaaattggttactctgaaacaaagaaaattcaaattggtgctaaaacaaaggagaaaaaatttcaagaatattttacaaataataagacatatttaactatataaaaccaaacttaatcaacaaagacttggagtgaaaatataaaataaattttaaaaagagtttaacaaaatttgtttaaatccaaaggaggcaaaggaacagcacagaaagcgaggaaacactcaaataaaatccgccaaaaatcgcagatccctggaaaccaattcgtgtgaaatcggtcaagcccccaacgacttttagcccgtctcagacggagcaccgccaagattcttaccgccagcagcgca

SEQ ID NO: 699 - DNA, 301 bp, synthetic construct
  misc_feature 1..301: note = Description of Artificial Sequence: Synthetic polynucleotide
  source 1..301: mol_type = other DNA
gcgccggagcgggcagggccgagcggcagcgcggagccggggtactcgcggcggcggcggcggcggcaggagcggcgcggcccggcccggcggcggcacagcgcggcgaggcggcccgggaagcacagcgaggcccgcggggcgccgcccgcgccgggaggagcggcggcgtcccggcgagaagtaagagctccgcgcactccttcctccaacccgcgcggccgggagcggtgtggggcggcggccgggaccgtccagcgcgctgccgcggctcccggcgccactccgcgggctctgttct

SEQ ID NO: 700 - DNA, 82 bp, synthetic construct
  misc_feature 1..82: note = Description of Artificial Sequence: Synthetic oligonucleotide
  source 1..82: mol_type = other DNA
gggttccctcagcggatcgggccacctcggggagcggcgccccttttctttcgggtcgttgctgcagagggaaaactccagc

SEQ ID NO: 701 - DNA, 166 bp, synthetic construct
  misc_feature 1..166: note = Description of Artificial Sequence: Synthetic polynucleotide
  source 1..166: mol_type = other DNA
ccgccgcccattcagcgcaacagccgtcggtcctctcgctttcccgtaggggccgtcggcgttcgtttgaaacgcggtccacccgtcccagcgtagccggcgctcttcggcgccgcgcgcaaacttcccgagccggcgggtgcgggcggtggcagcggggcccgga

SEQ ID NO: 702 - DNA, 286 bp, synthetic construct
  misc_feature 1..286: note = Description of Artificial Sequence: Synthetic polynucleotide
  source 1..286: mol_type = other DNA
gcacagagcctcctcggctgaggggacgcgaggactgtcctcgccgccgtcgcgggcagtgtctagccaggccttgacaagctagccggaggagcgcctaggaacccgagccggagctcagcgagcgcagcctgcagctcccgcctcgccgtcccggggggcgtcccgcctcccaccccgcctctggacttgtctctttctccgcgcgcgcggacagagccggcgtttaggcccgagcgagcccgggggccgccggccgggaagacaacgcgggcaccgattcgcc

SEQ ID NO: 703 - DNA, 200 bp, synthetic construct
  misc_feature 1..200: note = Description of Artificial Sequence: Synthetic polynucleotide
  source 1..200: mol_type = other DNA
cgagtctctgagaagagggagcataggctgtgctgatttaaaaacagaaaatgcaaagttggactgaaaatatcccacgtcttctaagcaatctgcttaaggcttccaaacttaccttaatttggtaagaaaataagctgccctatttttctttcttcttctcttacaactggaagcagccatttccccaaaccaccacc

SEQ ID NO: 704 - DNA, 418 bp, synthetic construct
  misc_feature 1..418: note = Description of Artificial Sequence: Synthetic polynucleotide
  source 1..418: mol_type = other DNA
ctggcgtcccggccgaggcagcatcccagcctttaccctgtgggcccaacgtgaggagtgtgaggagcggcatgcggcgccccctggctggttcggtgtcttttgacctgctgttgactgctcccagggggccctgacgccctggggcacttttgctctgcacaggaccacgctggggtttgccatggtgacataaaggggtgtagaggaaggaaggagcaagaccagcctgtagactgtgcccctggctgggcaaaagggccaggggcccggagccttccctccactgccctcgaacgcctcacttcctaagtctctgcatttctcagtcagtggacagcttttgggactcttgtgtgaggactttgggggaccaggccaggctgggcctctgctgattgagatcttgggatccaga

SEQ ID NO: 705 - DNA, 750 bp, synthetic construct
  misc_feature 1..750: note = Description of Artificial Sequence: Synthetic polynucleotide
  source 1..750: mol_type = other DNA
tgccacccggcgtggaggacggggtccaccctggtgggctgagcgcgaggccggagggctgggaggctgcggctgggctgagcactgcggagggccgtcggcttatcccaggtcccggtcacgcagcggccacgctcggggagcgcgcggacctgagcgggcaccacgagccgcagcgcgccgcctccccctggtgggagcggtacttgagcccgactgcggcggagcgttcgctcggagatggcggagccgccgcgacgcggcccgaggccccgcgagcagggaagccgggcagccccgggacgcggcagggcccggggacagcggggacgccgcccactccaccgggtatgaagctaaaatacagtggttacaacacaggaggttgacaggcctgacctttgaatcccagttcatccacaaacggagctttgtaatctcggattgtaagggccaagcttgtggactttagtgacttctgatctaagaacctccaccagggctgagggagctcaagtttcagcctgaggcatgggccaggaggccatggtgacctgagacccgtggattctgtccagtacaccctgttgctccttctgcctcccctctcctgtattgaaagcgtttgtgttcatcttatcagggacctgaccctaagagaatccttcccctgccaaggcagttccagcccccagaactcatcaccccatctcctgaggtggttcctatcctccctctcttctcctcgcc

SEQ ID NO: 706 - DNA, 247 bp, synthetic construct
  misc_feature 1..247: note = Description of Artificial Sequence: Synthetic polynucleotide
  source 1..247: mol_type = other DNA
ctgggggaggcggctgcagccgtggctctgcagcgagagcgcagagaagcagaggaccaagaggcagaatgccggcgctccaccgcccgagactgtgtttcctgtgagtccagatgtgtgatccagatatgctgcaatggtgacataaactgttgactgagactaggagcgtgcctgaaactccatccctcctcctattattttttaatggtgcttctactggaatagtcaacaaagtgcacccaac

SEQ ID NO: 707 - DNA, 515 bp, synthetic construct
  misc_feature 1..515: note = Description of Artificial Sequence: Synthetic polynucleotide
  source 1..515: mol_type = other DNA
agaagcagacaggagcagctggtattccggtgattaaatagttctcatagcctttttgctgtacccggtctgctccctggggtaaggctcgtgtccgagaaggaagctgcattttaacggtgtgctgaacagaggtctgaatcattccagctggctgcttgttttgaaaaggacaatgtgtgtataaataaaaagactgctggaagggtccagacaccggcaccggagctgaggagtgctctcagaatcctgttgaggcagatggcacgaactgaaagctccgctaattaacgtggagccaagtaaacctgaattctggatatctcattttctaacttcggataaattcaagttagcaaaagaaaaaaaaattgaaatgcttctctagataatgcttaaaggaccctgcagcagttcttggtattggacatagcatctcagctgttgcctcctggtccgctgactaccagatttgactcatttgtgattccttcgagaatctcccatgatttgca

SEQ ID NO: 708 - DNA, 59 bp, synthetic construct
  misc_feature 1..59: note = Description of Artificial Sequence: Synthetic oligonucleotide
  source 1..59: mol_type = other DNA
tttataatttcttcttccagaacacctctgaaagcttggtcaagggtacattttttttc

SEQ ID NO: 709 - DNA, 1021 bp, synthetic construct
  misc_feature 1..1021: note = Description of Artificial Sequence: Synthetic polynucleotide
  source 1..1021: mol_type = other DNA
agcgcagaggcttggggcagccgagctgcagcgaggccgcggcactgggggcgagctgagcggcggcagcggagctctgtcgcgagacgcagcgacaaggcagactattcagcggactcaccagcccgggagtctgtgctctgggatttgatattcaaacctcttaatttttttttcttaaactgtattgttttacgctttaatttatttttgcttcctattcccctcttaaatcgtgccaacggtttgaggaggttggttcttcactccctcaaatcacttcggattgtggaaatcagcagacgaaagaggtatcaagagctccagagagaagtcaaggaagagagagagagaccggtcagagagagcgcgctggcgagcgaacagagagagggacaggggcaaagtgactgacctgcttttgggggtgaccgccagagcgcggcgtgagccctcccccttgggatcttgcatcggaccagtcgcgctgacggacagacagacagacaccgcccccagccccagcgcccacctcctcgccggcgggctgccgacggtggacgcggcggcgagccgcgaggaaccgaagcccgcgcccggaggcggggtggagggggtcggggctcgcgggattgcacggaaacttttcgtccaacttctgggctcttctcgctccgtagtagccgtggtctgcgccgcaggagacaaaccgatcggagctgggagaagtgctagctcgggcctggagaagccggggcccgagaagagaggggaggaagagaaggaagaggagagggggccgcagtgggcgctcggctctcaggagccgagctcatggacgggtgaggcggccgtgtgcgcagacagtgctccagccgcgcgcgcgccccaggccccggcccgggcctcggttccagaagggagaggagcccgccaaggcgcgcaagagagcgggctgcctcgcagtccgagccggagagggagcgcgagccgcgccggccccggacgggcctccgaaacc

SEQ ID NO: 710 - DNA, 453 bp, synthetic construct
  misc_feature 1..453: note = Description of Artificial Sequence: Synthetic polynucleotide
  source 1..453: mol_type = other DNA
ggcacgaggctcccattaatatttcttcttctgtgtaattccattattctgtagtagattcacgtccgagtttaaagaagagagaaaactgaaaaggcagaaaattccagagctttagatttagccaaagatagttatggtcgtgttgttcttggtgaagattggcaaagtaggagccaatggaagaaactaagatcataatcaatcgccccaaaaacaaccttgttcattctatggtttttctcttcggtttctatgtttgggattgggaattcctcactgtccttttgcttttcagttattgctccttctaattttccctagctaggatcttctcaattaatttcctttttcattttcaactaactcataattagcccaaatcttcaaaagagttttgtgtaagttgatagacgtttagagaaacagagaaatacaggggaaaaacaaggg

SEQ ID NO: 711 - DNA, 115 bp, synthetic construct
  misc_feature 1..115: note = Description of Artificial Sequence: Synthetic polynucleotide
  source 1..115: mol_type = other DNA
gtgtttccaccactccaagaaggcagcattcagagttcttggctaagtcgaccttgtgaggagctggtgataatttgattccatctccaggttccctgtaagcacatcgagaacc

SEQ ID NO: 712 - DNA, 164 bp, synthetic construct
  misc_feature 1..164: note = Description of Artificial Sequence: Synthetic polynucleotide
  source 1..164: mol_type = other DNA
accgattaagcacagtacctttacgttatatataggattggtgtttagctttttttcctgagcccctggttgacttgtgcatgaacacgagccatttttagtttgtttaagggaagttttttgccacccaaaacgtttaaagaagaaaagttgtttcttaaacc

SEQ ID NO: 713 - DNA, 523 bp, synthetic construct
  misc_feature 1..523: note = Description of Artificial Sequence: Synthetic polynucleotide
  source 1..523: mol_type = other DNA
ggttcggtgttcttctcaaataaaaagattgtaatcatttagtgaaataaaaattatatttttttcacttataaatattgcaagtatttaattggcgcagtcggttaggatccaataaaataaaagagtccttttagtacggtactgatcaactgaaggatatgctatacgactagctatccaagatcagcgaattaaaatagtgattcaaaaatattttttaatccgcaaaagaatctacgtgaaagtagtattcaaaataaaatcccgtgcggtcggaaacaaaaattaatttaaattttttaattccgaaacttaaaaccaagtttaaagaaaacttaaaatcaagaaaacttaaaaccaagtttaaagaaaacttaaaatcaagaaaacttaaaaccaagtttaaagaaaacttaaaatcaagaaaacttaaaaccaagtttaaagaaaactcaaaatcaagaaaacttaaagccaaaataagctagaaaactaaaagacatcatggcagtcccacaac

SEQ ID NO: 714 - DNA, 105 bp, synthetic construct
  misc_feature 1..105: note = Description of Artificial Sequence: Synthetic polynucleotide
  source 1..105: mol_type = other DNA
caaaataatgataacgagaataatatcaagaataccttagaacaacatcgacaacaacaacaggcattttcggatatgagtcacgtggagtattccagaattaca

SEQ ID NO: 715 - DNA, 206 bp, synthetic construct
  misc_feature 1..206: note = Description of Artificial Sequence: Synthetic polynucleotide
  source 1..206: mol_type = other DNA
tctagactcccggcgaacactcccctccgccttcttatgctcatcccctccgcttccgaagcacaacatttcaaccagaaacactagccgaagcaaatccattccacaagcacctggtgggatcatctcatcatcagaaaccaagagagagattccgtgtccgcttgttgtagtagattgtgaggactgaggaccgagaagcagcc

SEQ ID NO: 716 - DNA, 259 bp, synthetic construct
  misc_feature 1..259: note = Description of Artificial Sequence: Synthetic polynucleotide
  source 1..259: mol_type = other DNA
tttttttttctcgtactgtttcactgacaaaagttttttttcaagaaaaattttcgatgccgcgttctctgtgtgcaacggatggatggtagatggaatttcaatatgttgcttgaaattttaccaatcttgatattgtgataatttacttaattatgattcttcctcttcccttcaatttcttaaagcttcttactttactccttcttgctcataaataagcaaggtaagaggacaactgtaattacctattacaata

SEQ ID NO: 717 - DNA, 174 bp, synthetic construct
  misc_feature 1..174: note = Description of Artificial Sequence: Synthetic polynucleotide
  source 1..174: mol_type = other DNA
gacgtccttgtgagcatgaggtaccctgctctacttagatcttgtttatttgtagtttccttttcaagtcagtggatctcagcgatgtacgctcaatgattccaatttttctgttcttgccttcaggttgtctattacactttcatgtcctctggacttaactctgtttcccat

SEQ ID NO: 718 - DNA, 456 bp, synthetic construct
  misc_feature 1..456: note = Description of Artificial Sequence: Synthetic polynucleotide
  source 1..456: mol_type = other DNA
actcagcttacacacaaaaaagcagtaaaatataaaatacaaaaattaacagctgcgtttatctatagatatatatatacacatctatatatttgaataagcgttcgatttgaatcaaaattatagcccaagctatcagctacccccacaagctttgtactccacaaaaacgctaacgagcaaaatcgataaagaccagatagcaaatgaaatcataccatctgccatagatctatgctataaacatatataggtgctgatctgtgctcttgaatttagtgttttttgtgtgtgcgtgtcgcgagaggagcactcaaaaccaaaaaaaaaaaaaaaaacgtatagtaaaacaaaaaactatctctagtcgctaggctataactatacaaactccagctatcccagatccagatccgtaaacagcaaatagttatatatctataaccccaaaatacg

SEQ ID NO: 719 - DNA, 310 bp, synthetic construct
  misc_feature 1..310: note = Description of Artificial Sequence: Synthetic polynucleotide
  source 1..310: mol_type = other DNA
ccagtatctccgctggccatcagtcaatcaatcagcagaccgcagcccaaaaatgtttcaattatgttatcgccagcaacaacgacatcgtccagaatcgaaagcatcgaaccagagcagcagcaaccacaagaaggcagccgcactgtccaggacgaaggagtaagacgtgcaattccgcaaaggctaaatccggatacggaaccggagcccactgcaaaaccgaaatcacaaggcaaccaagagcaatttagcatagcaaccgcaacgcaatcagccaggccaggatcagaagcaggacttcttagcc

SEQ ID NO: 720 - DNA, 419 bp, synthetic construct
  misc_feature 1..419: note = Description of Artificial Sequence: Synthetic polynucleotide
  source 1..419: mol_type = other DNA
atacacaagtttctctattacgaagcaagcaaaaagtgattgatagttagttctccacaattttttttcctgtttcaaaatttttaaaattgtcaaattcagacctatgggtcccataaatgtttcgtgctgcgttccataagcaaacactaaaatatatcatccgttgaacaaatcgtgcccgtctaactgtcgcgtcaatccgctaactattgtcttgcgatgaacgacaccatggtgtagccaagagaacatcagcattagccaaaccacacagttcccaactcgatccccagagatccatcacccccacaacaagcaggcaaggcgaggtcgtccaacgccaaaaaaaaacaaacttaaaccaacttcacatacacatccggttacgacagcaacatacgtcgtagctgataaac

SEQ ID NO: 721 - DNA, 568 bp, synthetic construct
  misc_feature 1..568: note = Description of Artificial Sequence: Synthetic polynucleotide
  source 1..568: mol_type = other DNA
cccaagtgacttaccagatcattgggcctcaggtacatcaaatccatcgacctcgaccagcagcagcagcagcagcagcattagtgccagcggcagcaacaacaacaaatacaacagcggcaacatatcggtctgcaacctgccgcgctcatcgccggccgctgcaacagcagccgttacactatcgtcggccgccggcggtattggcagcaacttgttgagcggcttgcatcacggtctggcgcccggtacgcatccactgcagcgcgcgacggcagccagcggaggcggagctggtgctgggggcgtggcaggcgcctcaacagcagcggcactcacactccagcaacatcagcaccagcagcagcaacaacaacagcagcagcaagcgcaacatcagcatcagcaccagcatcagcagcagacgcaacagcagcaattggcctaccagcaccagcaactgcagcagcagatcatctcgcatcgttccatacaaaacaaggcggcggccaccgctgccgcacaaacggcaaatcttgctgctgccctgcagcgatcggctgccatt

SEQ ID NO: 722 - DNA, 207 bp, synthetic construct
  misc_feature 1..207: note = Description of Artificial Sequence: Synthetic polynucleotide
  source 1..207: mol_type = other DNA
aaaaaacgcttttacgaggtatcagcacttttctttcattgggggaaaggcgtgagggaagtacccaacagcagcagactttgaaactttaaacagacaggtctgagagcccgaactctccttttcctttgacttcagcctccaaggagttccaccactttggcgtgccggcttcactttcattaagtgaaagagaggtgcccagac

SEQ ID NO: 723 - DNA, 127 bp, synthetic construct
  misc_feature 1..127: note = Description of Artificial Sequence: Synthetic polynucleotide
  source 1..127: mol_type = other DNA
gggaggcgatgaattgggacgcaggcgcgaccacagggaccactccccctacacagacatgagaccataggggagctgtctgggtggcctcaaggataggcgctccccgaggtgtgaatgaggcagg

SEQ ID NO: 724 - DNA, 270 bp, synthetic construct
  misc_feature 1..270: note = Description of Artificial Sequence: Synthetic polynucleotide
  source 1..270: mol_type = other DNA
agcactggccgtggccgtggggcccgcgaagggcggcgcgcggctgatgaaaccggctcggattccgcccgcgtgcgccatcccctcagctagcaggtgtgagcggctttctgcccgcagtctctacacagctcagcatcctgacgcctcctccccttgcaggggcgtgaagctacttcagactctgctgtgacgacttggccgccaggcaccgatcctccccggtgagaaggtccacgaatcttactgcagacagatttgctcagcgcg

SEQ ID NO: 725 - DNA, 120 bp, synthetic construct
  misc_feature 1..120: note = Description of Artificial Sequence: Synthetic polynucleotide
  source 1..120: mol_type = other DNA
ccgccgcccattcagcgcaacagccgtcggtcctctcgctttcccgtaggggccgtcggcgttcgtttgaaacgcggtccacccgtcccagcgtagccggcgctcttcggcgccgcgcgc

SEQ ID NO: 726 - skipped

SEQ ID NO: 727 - DNA, 694 bp, synthetic construct
  misc_feature 1..694: note = Description of Artificial Sequence: Synthetic polynucleotide
  source 1..694: mol_type = other DNA
gagtggtccagcaggcacgggcctgctggcgtgggtcgcagcacccatcactgacccggtgctggaggaggaaaccggcggagcagcttccccactctcagttgcgcgtctggcgatggcgatcagaggtcctgctgcgctctccgctgcgctctccctccattagccgcgctacgcggtgctgcgccctcgctggtgcctcgctcctggctcacaggatcggccccccacttccaggcacgacccccttccccggcccctcggcctttccccccactcagccatctccgacccggggcgcgcgttccccccggcccggatccttctctccctccggggacacccgctccctagccccggctcgaccctccccaaagcgcagcacggagtctcggcgtcccatggcgcaacccacagccttggcccagaagctggtgcggcccatccgcgccgtgtgccgcatcctgcaaattccggagtccgacccctccaacctgcggccctagagcgcccccgacgcccggggggaaagagagcgcgagagcgctgagcagaaagcgggagaacgccccgaagccggcccatggggagcgagtacccagcaccggctagcacgaccgccgcccacaccgcgcccggcctgtgaagcccaggacccccctccccgggagaggcccatgagggcaggagagtg

SEQ ID NO: 728 - DNA, 387 bp, synthetic construct
  misc_feature 1..387: note = Description of Artificial Sequence: Synthetic polynucleotide
  source 1..387: mol_type = other DNA
atgaccgatgagcataaaagtaacattaacagtaacagcagtcactccagcaacaacaacaacaacggcagcagcagcaataacgacaacaacagcaacgacgacgcagcaagtagcagcaacagcaaaaacaacaacaccagcaacgagagcagccacagcaacaacaatactagtagcataattgcagaggcggccgccaagtttctactgaaaaatggcctaaacggcagtagcagcaccagctacccccctctgccaccgcctctgcccgccaacttaagcaggacgaccacgcccacgacaacgacaacgccctcatcctccagctccaccgcctcaaatggctttttgccgcatgccaagacgcccaaaagtagtagcatt

SEQ ID NO: 729 - DNA, 270 bp, synthetic construct
  misc_feature 1..270: note = Description of Artificial Sequence: Synthetic polynucleotide
  source 1..270: mol_type = other DNA
taaaccccagttttatatcgtatatgctatctacaggtccactttacacttaataatataaaaatactactataaaggaaccagaaaaataaaaaagggtcattatttatttgagcagatcattatcaaacgcataggaagagaaaaaacacagttttattttttttccacacatatttattggtctcctagtacatcaaagagcattttaatgggttgctgatttgttttacctacattttctagtacaaaaaaaaaacaaaaaaagaa

SEQ ID NO: 730 - DNA, 185 bp, synthetic construct
  misc_feature 1..185: note = Description of Artificial Sequence: Synthetic polynucleotide
  source 1..185: mol_type = other DNA
gggacgtgaaaattacagtagttactgttttttttggactataagatcgggggaaagataacacataagaaataaaacgactactagttagactgctctgcggaagaagcaaggaagtaaaggctgcattttatttttcttttctagtccaacataaacaggtgtatcaagagaaacttttttaa

SEQ ID NO: 731 - DNA, 60 bp, synthetic construct
  misc_feature 1..60: note = Description of Artificial Sequence: Synthetic oligonucleotide
  source 1..60: mol_type = other DNA
cccttatatttactcaccttccccctactctaattctcctgatttcagaacaaaaaaaaa

SEQ ID NO: 732 - DNA, 176 bp, synthetic construct
  misc_feature 1..176: note = Description of Artificial Sequence: Synthetic polynucleotide
  source 1..176: mol_type = other DNA
cccttaggatactttctgatttacatccgaagaattgggtgcgtcaattaaaggcaattcttcgctctatcaagcagttttactgcgtctgtctaaagaaacaattgttttactgaatttcaacaaagttctaactcgaggtgaccggaggccactgtaataataaaaaatagaag

SEQ ID NO: 733 - DNA, 167 bp, synthetic construct
  misc_feature 1..167: note = Description of Artificial Sequence: Synthetic polynucleotide
  source 1..167: mol_type = other DNA
attgaaaaagtgaccattttttactcctgttcaagcgcatttgctttgataccattttgtttgccgaagacacggtgagttgacgttagtaagtcactgaggctataaaaaataaacacgaagacgtttatagacataaataaagaggaaacgcattccgtggtaga

SEQ ID NO: 734 - DNA, 194 bp, synthetic construct
  misc_feature 1..194: note = Description of Artificial Sequence: Synthetic polynucleotide
  source 1..194: mol_type = other DNA
ggatccaaggcatattctgttacattgtacctgtaggatttactgagagctgaaaccattgaaaactattctgcaattaattatcttcgtacggactatcactacttttttttaagaaagacttatttctattgtttattgtttataattcactctgaatactcgcttattaattgtgtgataaattctaaagg

SEQ ID NO: 735 - DNA, 342 bp, synthetic construct
  misc_feature 1..342: note = Description of Artificial Sequence: Synthetic polynucleotide
  source 1..342: mol_type = other DNA
ggcctctaacaatctggaatagaatgtcgatcaggcacgttcgtgtaaacattacgattttggaattccacttacataagatagcttctttgtaaaagccgttcgaagatttcgtttatagtgatgctttttctggagagatttaagataataaggatatgtggaaggaaatgaaaatgtacacctacaaagcgttgatggtatggaaactatcgaccatagtttgttaaacaggaaatatttgcttgagggtaaagtgttctgattcattatacaaagccccttgcttataagaaaagaaaccaaatcagaaaaggagattatttcaaggtaggcatcgaa

SEQ ID NO: 736 - DNA, 458 bp, synthetic construct
  misc_feature 1..458: note = Description of Artificial Sequence: Synthetic polynucleotide
  source 1..458: mol_type = other DNA
cgccccctcacagaaacttatgggcagcttgctgccttaacggaattgactagaattggtttgatttttttttcttcctacttcttcttccatttccctcccctcttcctcatatatgtatacagaaaaatcatacccctataaattccttggccccaatcttctgtcagattttcctttataaaagagtctttgttttgtaattaaaagatacttttttctttcttcttctacgtctccttttttttttttaagaaaatttaacttataccactattttgttcgcaattgatcaagaaaaaatacaattgaaaaggttttacatttttaatttttctgctcatcgcgcttttttaaaaggataaataaacatttctttaaaaaacatcttcaataagaaaaatcggttaaaaaaacttttcttctcaaagcatacctaataacaatataatcccata

SEQ ID NO: 737 - DNA, 400 bp, synthetic construct
  misc_feature 1..400: note = Description of Artificial Sequence: Synthetic polynucleotide
  source 1..400: mol_type = other DNA
gccctcttgtttttctttttcatttttttaaatcacacttttttttcttttcaagatttataaatcttccttccaggtttgagccggacccattgtttaattaaagcatagaaggcaacgaaggagtgggttatagaattagcattgcggcaaaaacgtcatatttattaatatttatttgcgaaggtcatattcaacgcaatcgcacgtcctcttccgtcttttttctagcttttgtccttttttatttgtctacatccctttctctacggtatccagaagaaggtgtgtgtgtgtgtgtgtgtgtgtgtctataaaaagcagtaagagtcaccaaaaaaaaaaaacgacaaacaagtgatccgaagtgtgacgaataaagcaaactctccaactcaaa

SEQ ID NO: 738 - DNA, 399 bp, synthetic construct
  misc_feature 1..399: note = Description of Artificial Sequence: Synthetic polynucleotide
  source 1..399: mol_type = other DNA
tgacaaaaaataaaaaacgaaatccatcgtgaacagttttgtgtttttaaatcagttctaaacacgaaaagggttgatgaaaaacgcagaagaatccgaaaaactaactaaccgagcaaaaacttgacttgagtgttgtttgacaaatcaggaaagataaaaaacaaatcataagaaaaaactgcacgaaaaatgaaaaagtttctaatattcaaaatcttgcacaagaaatacaaaatcaattaaagtgaactctaaccaaaagttgtacacaaaataaaaagcaaaacaaagcagcgaagaacaatcacaagaagagcaaagtgccaacaaagtgcaggaaggaaggaagcggataaggacaaaaaggaagccagcacacacacacacacccacaca

SEQ ID NO: 739 - DNA, 318 bp, synthetic construct
  misc_feature 1..318: note = Description of Artificial Sequence: Synthetic polynucleotide
  source 1..318: mol_type = other DNA
acagtcagtccactctgaaacctcgacgagagaacattgaataacaagcggaagcgaaaagcgcagttgaaagttcgtcaaaaagcgacaagtttcctcgttcgttttcccgccaaatgagtcagaaaaattttccaagtgctcgatacgaaacataaagacttacaagacttaaagtgcaagcagtgaatggaatatattattcctcagcgatattgaaatcaaacattaaaaatatatgctacactaaagttatatatttttttaaagattcatacgttttgtaaaatcacattttgtattaaattaaataccgcc

SEQ ID NO: 740 - DNA, 22 bp, synthetic construct
  misc_feature 1..22: note = Description of Artificial Sequence: Synthetic oligonucleotide
  source 1..22: mol_type = other DNA
tttataatttcttcttccagaa

SEQ ID NO: 741 - DNA, 105 bp, synthetic construct
  misc_feature 1..105: note = Description of Artificial Sequence: Synthetic polynucleotide
  source 1..105: mol_type = other DNA
acaggctcatctcgctttggatcgattggtttcgtaactggtgagggactgagggtctcggagtggattgatttgggattctgttcgaagatttgcggagggggg

SEQ ID NO: 742 - DNA, 1118 bp, synthetic construct
  misc_feature 1..1118: note = Description of Artificial Sequence: Synthetic polynucleotide
  source 1..1118: mol_type = other DNA
cagtgtttcacgcgatttcgaaacgttgagatcgttgccgcggtcgccgtgaattggaattgtgagtgtgttcgtcgtgcggaaaatcatcgctgtcaaatagaggccacagtgaattgccgatacctaatactgtgcaaggcgaaattatgtgccccagcatttcgtgaatgaaaagtgcgaaaatacaaaatacagagcaatagtgcgaggtcggtggagttcgaattaaagaaattccacgaaatacaagtgcgggcgattctcgtgtgctggcgagagtgcggcttgtccgggtgtatcggcgacgactaaatgcatgattgagatcacgtgaaatgatcatcgagtgccgcgaaggtgtgaaagtaaaaatcatgtgaaaaatgtgagaaaaagtgtggaatgctatgtgacaacaaccacaaatactacttgcaaacaaaagatcaagagagcagcgaggagagcaacaacaacatcgagagaatcaagaaaaatgataacctaaataaatcaaattgctagtcagaaaaaacaaacaaacaaacaacaacaacaacagaaaccagggaactcaaagccacagaaagagagaggaaaattaagttatagaagtgatccgaattccgatcccgcgtgcattttctcccccaatctcaacctctctggtctacgggtttttcccgaatttacaattttcgggttttctcttgccaccgaagaaagctttcgccacaagctggaaagaaagtgccaaggcagcagtgaagaaaaatattatcgaaacgtgtttgaaatttataacaacaaggaaaagcgagggaaggtgtcattcattgttctcgaccaaggtgttctgcgtgaaaggaattgataataatctcactacaaagtgttcaatcaatgagttgcaacggcggaacaaatagaagaaaaattgcattccaactgaagtgaaatatttgttgcgcttttcggctgcaacagagtgtgagagcgggacgaaagatgattacctagcgggggtgagagagacccaaaaagcgaaagcagaactcgtggaaagctgaaaatttgaggaaacaatttcataatacgaatagaaacaccgcaat

SEQ ID NO: 743 - DNA, 207 bp, synthetic construct
  misc_feature 1..207: note = Description of Artificial Sequence: Synthetic polynucleotide
  source 1..207: mol_type = other DNA
ggcgatccacttgcctctgcctccctagtgctgggattaaaggcgtgcgccaccacaacgcgtttagtccctttcataaagaccggaggaacagacgtttacggccagctcccgaaaccaagtgaactggaggccaccctgcaccaagggttggaaccttttcacaaaatccacgctcctaatacaaggcaactctgaaccagtgca

SEQ ID NO: 744 - DNA, 125 bp, synthetic construct
  misc_feature 1..125: note = Description of Artificial Sequence: Synthetic polynucleotide
  source 1..125: mol_type = other DNA
aggagtggagtatatcaggcgggactcttgcgctccccctcgcactcgcgccttaggaagcttgggtgtgtgtggcgcgctgtcttcccgctcgcgtcagggacctgcccgactcagcggctgcc

SEQ ID NO: 745 - DNA, 784 bp, synthetic construct
  misc_feature 1..784: note = Description of Artificial Sequence: Synthetic polynucleotide
  source 1..784: mol_type = other DNA
ctagaaagcagttaacgagtagtctgtgttttttcgcttgcggttaaaagccacgaggtcgttcatcgttcatcgttttccttttcaacttcaagcaaagcaaatataaaccaatgcaaaaaacgcagtgatcttttgaggcccaaatcgtttggggccgaacaccgttgattctaaaacgcaaatgtagaaacaaatcaagaaagtggaaaataaatatgtttcgctttcaaaacatgtgaatgtgccgaactcaaaactgaaacgtagaaggaacgcgttcgttttttacatacgacaatcgtataaaataagagaaaagctccaaaacgtattaaatagcgatgcttggatgatcttcgtagcagtcacgttgtacatacaaatacatacatatgtacctactatatggcacataaaatacgttacgcacactagtggcgaataaaaagcgaattggatttcgctcaaaacaacaacacaatcatatatactacccataaaaaaaaaacaaacccataaaaaagtgcaaagcaaccaggaaaataaagtaaaacagtgccagttaacaacagcaaacggcgatcaacaaatcccaccggcaaaatcaacaattttttaaatcgcaatcaacaaggagcaacaaattagccagctatttcccattgcaaacatttggcggattgattgcgaagctttcacattcgcttcgatatcttttgggctggcgaggattgcttgaagagccgcaaagctgcaactgcacaacgaacttttctacccc

SEQ ID NO: 746 - DNA, 174 bp, synthetic construct
  misc_feature 1..174: note = Description of Artificial Sequence: Synthetic polynucleotide
  source 1..174: mol_type = other DNA
gaagtgataatcccaaaaaaaaaaacataacattagttcatagggttcgcgaaccacaagatattcacgcaaggcaattaaggctgattcgatgcacactcacattcttctcctaatacgataataaaactttccatgaaaaatatggaaaaatatatgaaaattgagaaatcc

SEQ ID NO: 747 - DNA, 489 bp, synthetic construct
  misc_feature 1..489: note = Description of Artificial Sequence: Synthetic polynucleotide
  source 1..489: mol_type = other DNA
agagtgaaatattactgctgaggaaacgtagcagggcacacgtctctctttgcgtcctggtgcctcatttctccatcacctacttacttcctggttgcagcttctcttcctttgggacttttgcacccggagctccagattcattaccctgcttcactgcggagccttcaggagtggcatccggtgcactgcagagacccgactctccttgctaccttatagccagaactgctgcaggctgattcttcacacacacactctctgctcttcccatgcaaatcagatctcaggtgcctcagcgtcctacccttctggagggctgcagtatagccaccccaagaccttactgctcagtgcctggaatcctgattgcgaactccgggggtcactcgtctccctcacccattgcccagggggcgagagaggccatcacaacctccagtttgtgtcaaggtccagtttgaatgaccgctttcagctggtgaagac

SEQ ID NO: 748 - DNA, 212 bp, synthetic construct
  misc_feature 1..212: note = Description of Artificial Sequence: Synthetic polynucleotide
  source 1..212: mol_type = other DNA
tttcggtttcacttccggtgaggggccgcgcctgagagggcgggcagtgaagcaaacggacggcgagcgcgggcggtggcagtgacggcggcgccgctgccggggggcgtgcggtaacgcggcggcggcggcggcggcgacggcggctgggcctcaagcgcctgcagcccacctcccggaggcgggctcccggcgcgaggacggacgagaag

SEQ ID NO: 749 - DNA, 384 bp, synthetic construct
  misc_feature 1..384: note = Description of Artificial Sequence: Synthetic polynucleotide
  source 1..384: mol_type = other DNA
accgatgagcataaaagtaacattaacagtaacagcagtcactccagcaacaacaacaacaacggcagcagcagcaataacgacaacaacagcaacgacgacgcagcaagtagcagcaacagcaaaaacaacaacaccagcaacgagagcagccacagcaacaacaatactagtagcataattgcagaggcggccgccaagtttctactgaaaaatggcctaaacggcagtagcagcaccagctacccccctctgccaccgcctctgcccgccaacttaagcaggacgaccacgcccacgacaacgacaacgccctcatcctccagctccaccgcctcaaatggctttttgccgcatgccaagacgcccaaaagtagtagcatt

SEQ ID NO: 750 - DNA, 384 bp, synthetic construct; identical to SEQ ID NO: 749
  misc_feature 1..384: note = Description of Artificial Sequence: Synthetic polynucleotide
  source 1..384: mol_type = other DNA

SEQ ID NO: 751 - DNA, 63 bp, synthetic construct
  misc_feature 1..63: note = Description of Artificial Sequence: Synthetic oligonucleotide
  source 1..63: mol_type = other DNA
ccacaagtcgctgataattcaaacagaaatcatttaccaagctccgtgagaaccttttccaat

SEQ ID NO: 752 - DNA, 29 bp, synthetic construct
  misc_feature 1..29: note = Description of Artificial Sequence: Synthetic oligonucleotide
  source 1..29: mol_type = other DNA
agtcagctccagcaatccagttcagcaac

SEQ ID NO: 753 - DNA, 188 bp, synthetic construct
  misc_feature 1..188: note = Description of Artificial Sequence: Synthetic polynucleotide
  source 1..188: mol_type = other DNA
agcaatcgcctagcgaacagccaacggtgaacacatagcagccacacaagctctatagctgatacaagcaacgaaatacaaacaacgcagtttgtgtaaacaatcaaattgtcgcagccatatcgagtgtgcttacacgtccagcggaaagttttcgaaaccaatccaatcaatcagctaagatgtcc

SEQ ID NO: 754 - DNA, 239 bp, synthetic construct
  misc_feature 1..239: note = Description of Artificial Sequence: Synthetic polynucleotide
  source 1..239: mol_type = other DNA
gcgagtcttgccattgggtagactgcccgcctttcctctgcaagtccctcctttcaccctccttcattgggaggggcagcagataaggggcggggactaggccgggcttgtggcgcgctgctccctcctccttacccccccctccctgtccggtccgggttcgcttgcctcgtcagcgtccgcgtttttcccggccccccccaacccccccggacaggacccccttgagctcgcccctc

SEQ ID NO: 755 - DNA, 303 bp, synthetic construct
  misc_feature 1..303: note = Description of Artificial Sequence: Synthetic polynucleotide
  source 1..303: mol_type = other DNA
tcagcaggattgggtcagggcctgactaccaagccctgctggcatcatactgcctggggtaacatgggaggcagggccagggggattagaatctctgagccatcacatgctgtcagggggaatgcgggctacagcttcctcgcaggcaggagtctcaggttctcctcattcctgcacccagtaacagccccagtgtgaccagctctgtggtggggacacctggactccttcttacagttctggtgctaagggaccacttccaaagctggggaaccccagggaggggtcagtggccagataccc

SEQ ID NO: 756 - DNA, 249 bp, synthetic construct
  misc_feature 1..249: note = Description of Artificial Sequence: Synthetic polynucleotide
  source 1..249: mol_type = other DNA
ctccagttctccccgcccaccctacagaaagtgtctcctgattggctttgaggccgcagggctcaggttacattcgcaagagttgcggagcgcgggagaccggacccaagaggagagaggctggttctgcaccgattctgtgctggtccgggagtgcccgacagcccctgaactaccacccagcattgtacaaacccacccccactctgagccaggctccaccccagccaaggaccctcaacaccggca

SEQ ID NO: 757 - DNA, 41 bp, synthetic construct
  misc_feature 1..41: note = Description of Artificial Sequence: Synthetic oligonucleotide
  source 1..41: mol_type = other DNA
agtcccgagcctaaagcctcgcctgcctgcccagtgccagg

SEQ ID NO: 758 - DNA, 148 bp, synthetic construct
  misc_feature 1..148: note = Description of Artificial Sequence: Synthetic polynucleotide
  source 1..148: mol_type = other DNA
gttattctccgaggggcccgacagcccccgggagctccaggatgaggagtccggcagctgcctctgggtgcagaagtccaagctgttggtgattgaagtgaagactatttcctgtcattatagccgtcgcgctgcttctcgacagtcc

SEQ ID NO: 759 - DNA, 102 bp, synthetic construct
  misc_feature 1..102: note = Description of Artificial Sequence: Synthetic polynucleotide
  source 1..102: mol_type = other DNA
aaaagaaagaagccagaacataccaccagccctttgagtatacaacataacaaacgtcattactttacaacttgattaggagacagtacagagatctgaagg

SEQ ID NO: 760 - DNA, 216 bp, synthetic construct
  misc_feature 1..216: note = Description of Artificial Sequence: Synthetic polynucleotide
  source 1..216: mol_type = other DNA
agtgctctggcgagtagtcctccctcagccgcagtctctgggcctcttcagcttgagcggcggcgagcctgccacactcgctaagctcctccggcaccgcgcacttgccactgccactgccgcttcgcgcccgctgcagccgccggctctgaatccttctggcttccgcctcagaggagttcttagcctgtcccgaaccgtaaccccggcgagcag

SEQ ID NO: 761 - DNA, 362 bp, synthetic construct
  misc_feature 1..362: note = Description of Artificial Sequence: Synthetic polynucleotide
  source 1..362: mol_type = other DNA
gaattccggggcggcggccgcggggatcccgcgagcggcccctgaacatctacccttcttgccgggacccgggaggtccccactggcctccgggcccgtcctgatcagactcgtgtcgacctccccgtccacgcgcatccgggagagccgcgccacgagacggacccgggcccgccgggacccctggtgtctggccctgcgtcgagaggctggtgactgccacccataagctccagcttcagcctcggcttactcccctcaggggcttgcaggctgaggcctgccctcggacgcggctgaccagcctctccctctcttccacactttggacttctctttggacctcctaaaaaggctccatc

SEQ ID NO: 762 - DNA, 648 bp, synthetic construct
  misc_feature 1..648: note = Description of Artificial Sequence: Synthetic polynucleotide
  source 1..648: mol_type = other DNA
agagagtggaggggaccaggatggcagcataggagccaaccatcaagcagcagtctctggactagaaatccaagagcataaaacgctcctccgagctgccgcttctgctcctgcctgcgctcaccctctggtgggagccgagagcggtgggagcacacggcttagctgggctttccaattcctgcaggcgacgcccatggtcctggacggcaccttcaagacaacttagggaggtctactctctccagttccaaaagaaagtttggacaaagtgaatttggggtgcatttgggagatggcagctgctccctctgcttcctctgtgtcacctctcagaagcccctgcctccaacccactccaaccttcccacactgacacccagctcccagtccctctttttctttctttggtccctgagcctctctggggtcagggatgttggtcctgttcccttctcctttcattgtcctttccatctgtctgctgagctgtctcacctgtttctaccttcaccccatcgtcacccctcacctcccttctctccacctctaaacctttctctctcattccattttatctatcaaagttcttacttgcacccatacctccatccaccttcccctccttctctccctgaaattctaact

SEQ ID NO: 763 - DNA, 234 bp, synthetic construct
  misc_feature 1..234: note = Description of Artificial Sequence: Synthetic polynucleotide
  source 1..234: mol_type = other DNA
gatctgcctgtaacgtgggggtggggcaggcaggggattagaaatctctgagatcaacatcacaagtgtctgggcttttctggtcctgaggctgtggacagctcccggagtggtggctctgtggggggaacattagagctcctgtaacacaggagtcctggtgtggagggaccctccttgtcacataggccccttctgaagctggcgaccccctgggtggcagccgcacccagg

SEQ ID NO: 764 - DNA, 300 bp, synthetic construct
  misc_feature 1..300: note = Description of Artificial Sequence: Synthetic polynucleotide
  source 1..300: mol_type = other DNA
ggaagatatgaccacctcctgattatttttgcagcgggaaactttgaaatatttttcattgctttctcccatactaagattgtgtgtgaggcagtgagggagtcccttgacttactcaagtcatttcattggattttaattacaactgatcatgtgattgtttttttccatgtaaagtttggggcttcaaactttgcttctggagaatgccttttgcaacacttttcagtagctgcctggaaacaactgcttagtcatcggtagacatttaaaatattcaaaatgtatggagaatgggga

SEQ ID NO: 765 - DNA, 404 bp, synthetic construct
  misc_feature 1..404: note = Description of Artificial Sequence: Synthetic polynucleotide
  source 1..404: mol_type = other DNA
gtttctcctccgcggccagctcgggcagcccgagtctcctctgtcgcccgcacctgcgcgtcgcggtcgtcccgccctcggcggcggctcacctgggcgcagcgcgggcagggcgccgcctccgggacgcaggtggagcgggcagggcgcgggcaccatgagcagcggcgccaacatcacctatgccagccgcaagcggcgcaagccggtgcagaaaacagtaaagcccatccccgctgaaggaattaagtcaaatccttctaagcgacacagagaccggctgaacacagagttagaccgcctggccagcctgctgcccttcccgcaagatgttattaataagctggacaaactctctgttcttaggctcagcgtcagctacctgagggccaagagcttctttg

SEQ ID NO: 766 - DNA, 183 bp, synthetic construct
  misc_feature 1..183: note = Description of Artificial Sequence: Synthetic polynucleotide
  source 1..183: mol_type = other DNA
ggaggagccccaggagtgaagaaatttggagtctacgtgcgctcggaactgtgtcgtgattaaattagtcagccctcagagacaggcgtcctacctcctttatccagacctcaaaagccccgttgtgcacccgtggtggcttcttcaccttccctgtttcgtcctccactgtatggcccagac

SEQ ID NO: 767 - DNA, 193 bp, synthetic construct
  misc_feature 1..193: note = Description of Artificial Sequence: Synthetic polynucleotide
  source 1..193: mol_type = other DNA
gcggagcttctgggttgcgggccgaaacggcaagcggatggagggcgctcgaacggccaggtgtcgtgattaaattagtcagccctcagagacaggcgtcctacctcctttatccagacctcaaaagccccgttgtgcacccgtggtggcttcttcaccttccctgtttcgtcctccactgtatggcccagac

SEQ ID NO: 768 - DNA, 1015 bp, synthetic construct
  misc_feature 1..1015: note = Description of Artificial Sequence: Synthetic polynucleotide
  source 1..1015: mol_type = other DNA
ctgaagttaacaacgaaaaattaacgccagtcggagcagcctgaggctctcccgcttctcagctttagcgtcgtcagaccgagaagtggttcccggtcctgagggtgaagtggggagccgaggacgcaggcggcgatgtcctaggcggggacctcctccctacagcttcgggcgccgagcgagcgcagcggcgcttctagcggccggcgggcggcggcagcggctgcgatccgcaggctccagatctgtcgccccgagatccgctctccccccgcccccacttacctcccggcaccttgaaacgcgaggggggcccggggcactttgcaaagagcaggagggacgaggctgcgagctagacggcggcgaaggagagggcgagaggagaagccggggaaaggaaggactcggcggccggaggactcggagcgcgctgccggcgcggggagcgcgcagcggcctcggaggaggaggcggaggaggcggcgcgggcaagcgacggcgccgcgagctgggcagccgcgctctgcttggcggtggcggacagcgaggagccacacgcaccgccgagatggactgctgaacctgcggggctccactaccgtactggaacccggagcggggcgccagcgcacccaggacacggtgccccaaggggcccctactgcaagctgttaacttcaagtcccttgcggcggctgggccaaacacgcccccgcgtcccgctcgtagcagccaccgccagggactcccaagcctcccggtggagatccgcgcctctcgggtgtccccacccgctaccccgactctgtccggtctccagtcgccggccccccagcagactccgcccggcacacggcttcctcgaacttgatttctcacctcctctgtcccgtcacctccatcctctttccgcccccgtctcgcctccaccccctcgatttcctcctcctcgccccccatttccaccctcctccccctcccccggccacttcgctaacttgtggctgttgtg

SEQ ID NO: 769 - DNA, 204 bp, synthetic construct
  misc_feature 1..204: note = Description of Artificial Sequence: Synthetic polynucleotide
  source 1..204: mol_type = other DNA
atgcttcattcgcctcacaaacaaccacagaaccacaagtgcggtgcaaactttctccaggaagactgcaagaaggctctggcgtttaaatggttaatctctgcaggtcactaccagccaccgagaccaaccgagtcatttaaggctgcaagcagtatttacaacagagggcacaagttctatctggaaaaaaaaggagggact

SEQ ID NO: 770 - DNA, 259 bp, synthetic construct
  misc_feature 1..259: note = Description of Artificial Sequence: Synthetic polynucleotide
  source 1..259: mol_type = other DNA
aaatggctgcatcctgccaggttaaggaataagagaagatgatgcggagccatccattccacaggccagggtcggtgcaaagcatttagggaacccacagcgcggccggcgcgctcccttcccacgcagggctctctctgtggcgcaaacggcaggagaaagatccatcagagctacacttgtgtctgcaggctgtctacacttctctcttggcagaaaccccatcaggagagctttggaaccatccacccctaaatag

SEQ ID NO: 771 - DNA, 344 bp, synthetic construct
  misc_feature 1..344: note = Description of Artificial Sequence: Synthetic polynucleotide
  source 1..344: mol_type = other DNA
ccctgaggtgcgcaccgatatcgatattcgtgccggtttagcggttctgcgacccaaagagtccagggagatccaccgagtggtgcctggcgtataggactatgcagccgccttgtggctcggagcagcggcccgcgatgtcccagccactgtgaaccatttggtcagcgccaacctgctcagccccagcaccgacaggctcagcctctggtacgctccactccgcgggaggccaccagcaccaagcagcaagagggcgcagggaaggcctcccccctccggcgggggacgcctggctcagcgtagggacacgcactccgactgactggcactggcagctcggg

SEQ ID NO: 772 - DNA, 93 bp, synthetic construct
  misc_feature 1..93: note = Description of Artificial Sequence: Synthetic oligonucleotide
  source 1..93: mol_type = other DNA
tcgccatattgtgcggcggcgccggcggttgattctcgagtctcgctccggccactgccagcgcacccccgggctggggcaggagccgaaatg

SEQ ID NO: 773 - DNA, 87 bp, synthetic construct
  misc_feature 1..87: note = Description of Artificial Sequence: Synthetic oligonucleotide
  source 1..87: mol_type = other DNA
agcttgcttttcaacattattatgatggcatgtgataaagtaaattatttaatttatttttgatcttgttgacttacgagttcagga

SEQ ID NO: 774 - DNA, 100 bp, synthetic construct
  misc_feature 1..100: note = Description of Artificial Sequence: Synthetic polynucleotide
  source 1..100: mol_type = other DNA
ttatagtcacgggatctcacgtgattatatatcatgtgctctacgtaggaaaaaaaattcatggtagcagctctgtgaggtgcatggtagcaggttcaaa

SEQ ID NO: 775 - DNA, 174 bp, synthetic construct
  misc_feature 1..174: note = Description of Artificial Sequence: Synthetic polynucleotide
  source 1..174: mol_type = other DNA
attgacggatttctcggctaggatgatggagcctgatgacggtgcggactcttccttcattattaacgtaggggtctcccagaatcgctgaaaacgggagcgcggcagccgcgacagtaccagttgagagtcgattcggtcggttaacatcgtaagcatcgtggcggtggtgtg

SEQ ID NO: 776 - DNA, 174 bp, synthetic construct
  misc_feature 1..174: note = Description of Artificial Sequence: Synthetic polynucleotide
  source 1..174: mol_type = other DNA
aatttaaatatgttaataatgctgaagacaagtatttcgattattaacctctatatttctatataaagtatctgtgagtctcagtggacatcacagtaaggtcgcagttaacttgtaatcttttcattcctgtgtcggagcagtggtaatggagccggacgatttcgccaaaac

SEQ ID NO: 777 - DNA, 174 bp, synthetic construct
  misc_feature 1..174: note = Description of Artificial Sequence: Synthetic polynucleotide
  source 1..174: mol_type = other DNA
ttgcctctctcaacaaaaagccaccgacattaagagagagagtattgctgcttagttaactgcaggccctatttagggttaccgcccaggatctgcaacagcattcctgtatcatccagggcaccggtggacttggtgaggattgagttgacctcatcattagagaccagactc

SEQ ID NO: 778 - DNA, 174 bp, synthetic construct
  misc_feature 1..174: note = Description of Artificial Sequence: Synthetic polynucleotide
  source 1..174: mol_type = other DNA
actctcccccaccgcccacagagggccactcacgcatccccagtgggttttgcggaccctctcttctctcccgggccgcccctatcgctcgacctctccacacctgcaccacccccgccgtccgaacccaggcctaattgtccgcgcatccgaccctagcgtgttcgtggaacc

SEQ ID NO: 779 - DNA, 174 bp, synthetic construct
  misc_feature 1..174: note = Description of Artificial Sequence: Synthetic polynucleotide
  source 1..174: mol_type = other DNA
aatcgtgtttaactttagacgcagaaggcaattcagcagcccagcgtttttggggagaacgatcctcatgcaaaaaaccacttgtacgatggaaagatccacttaccaatctgtggtatgggcctgaccctgtattaatatggggacgagggcatgtttgtgtttttccacagg

SEQ ID NO: 780 - DNA, 190 bp, synthetic construct
  misc_feature 1..190: note = Description of Artificial Sequence: Synthetic polynucleotide
  source 1..190: mol_type = other DNA
ccaacaatgtgatcttgcttgcggaggcaaaatttgcacagtataaaatctgcaagtagtgctattgttggaatcaccgtacctatttaggtttacgctccaagatcggtggatagcagccctatcaatatctaggagaactgtgctatgtttagaagattaggtagtctctaaacagaacaatttacct

SEQ ID NO: 781 - DNA, 174 bp, synthetic construct
  misc_feature 1..174: note = Description of Artificial Sequence: Synthetic polynucleotide
  source 1..174: mol_type = other DNA
tattttctgggcctgatgtacctatagagcatgcacctacacaggttttcccatttcctttggcccctacaacgccacaagtgtctatttttgttgatgggggtgatttttatttgcaccctagttattatatgttaaaacgtcgacgtaaacgtgtatcatatttttttacag

SEQ ID NO: 782 - DNA, 174 bp, synthetic construct
  misc_feature 1..174: note = Description of Artificial Sequence: Synthetic polynucleotide
  source 1..174: mol_type = other DNA
tttggagagttcgtcctcgcagccccgctcgggcggcatcggaactctccagttcgtggaggagtttactccctctgtctacttcaaccccttctccggctctcctggccagtacccagacgagttcataccgaacttcgacgcaatcagcgagtcagtggatggctatgattg

SEQ ID NO: 783 - DNA, 174 bp, synthetic construct
  misc_feature 1..174: note = Description of Artificial Sequence: Synthetic polynucleotide
  source 1..174: mol_type = other DNA
gggtagtggctcgcgcccgtagtctggagaagcatcgccagggttgagtcgcggcagaacccggttcgcggacggccgcggcgagcgggacttggtcaccccgccgatttaaagacccacagccagccgacttctccagttacgggagcgagcccccttttttctttttgccag

SEQ ID NO: 784 - DNA, 174 bp, synthetic construct
  misc_feature 1..174: note = Description of Artificial Sequence: Synthetic polynucleotide
  source 1..174: mol_type = other DNA
ttaaaatcagttagcaaatttctgtccagtttattcagcagcacctccttgccctcctcccagctctggtattgcagcttcctcctggctgcaaactttctccacaatctaaatggaatgtcagtttcctcctgttcctgtccatccgcacccactatcttcatgttgttgcag

SEQ ID NO: 785 - DNA, 174 bp, synthetic construct
  misc_feature 1..174: note = Description of Artificial Sequence: Synthetic polynucleotide
  source 1..174: mol_type = other DNA
tagccatgctccagcccagcgttggtttccttctgttcatcctgtgggggttctagacgagccggctcttccaagcccaggtcctgcttgattttgggttgctcgtgggtggttaagttctcctcctcctgctcctgcttacgcggctgctcctccatcttcccctaggaaaca

SEQ ID NO: 786 - DNA, 174 bp, synthetic construct
  misc_feature 1..174: note = Description of Artificial Sequence: Synthetic polynucleotide
  source 1..174: mol_type = other DNA
aggaacaatctttaatgtatttacacagtagaatacagtgttttaattttcctaacaaaatgcctattttagatgatggtagtcctatgtatacatttactgacggtacttggaaatcttttttccaaaagcttggcagacaattagaattaacagatcctgaagaggaaaaca

SEQ ID NO: 787 - DNA, 174 bp, synthetic construct
  misc_feature 1..174: note = Description of Artificial Sequence: Synthetic polynucleotide
  source 1..174: mol_type = other DNA
ggcctcactccacaggcctatgctgtgatatctggggctcctgctgctatagctggatttgcagctttactgcaaactgtgactggtgtgagcgctgttgctcaagtggggtatagattttttagtgactgggatcacaaagtttctactgttggtttatatcaacaaccagga

SEQ ID NO: 788 - DNA, 174 bp, synthetic construct
  misc_feature 1..174: note = Description of Artificial Sequence: Synthetic polynucleotide
  source 1..174: mol_type = other DNA
tttccagaactacaggcacagatcgcgctaaacgagtttcctcgtcgcgagacacttcagcggtcagatcacaggaatctataaaaactggaatcgaccgtgcacaagtggaaccaaaacatgaattaactattaaagtttcacaattaccggtgtgctgcataacgccgaaac

SEQ ID NO: 789 - DNA, 174 bp, synthetic construct
  misc_feature 1..174: note = Description of Artificial Sequence: Synthetic polynucleotide
  source 1..174: mol_type = other DNA
ctgatctcttgttagatctttttgtaatctaaactttataaaaacatccactccctgtaatctatgcttgtgggcgtagatttttcatagtggtgtttatattcatttctgctgttaacagctttcagccagggacgtgttgtatcctaggcagtggcccgcccataggtcaca

SEQ ID NO: 790 - DNA, 174 bp, synthetic construct
  misc_feature 1..174: note = Description of Artificial Sequence: Synthetic polynucleotide
  source 1..174: mol_type = other DNA
tctattcaggtcccgatgtagtgttgcccacaggaccccctacatggccttatgcacctcaatctccttttgataccacccatgatgtagttatacagggctccacatttgcgttatggcctgtttattttttgaaacgtaggcgtcgtaaacgtattccctattttcttgcag

SEQ ID NO: 791 - DNA, 174 bp, synthetic construct
  misc_feature 1..174: note = Description of Artificial Sequence: Synthetic polynucleotide
  source 1..174: mol_type = other DNA
cccggacgcctccgctgccggtcgctccaagggcccccccgggaaggcgggtctgtggaccgtagggcccttaaatttttagagcagcccccgcgtcggcctgtctccccgccgtgcgtggccttacaaatctgcaagtgccccaaatcggacacgggcctgtaatataccaac

SEQ ID NO: 792 - DNA, 174 bp, synthetic construct
  misc_feature 1..174: note = Description of Artificial Sequence: Synthetic polynucleotide
  source 1..174: mol_type = other DNA
ttgtagtttttaaatcctgttttgtaccattgtatatgtgttatgaatgagatgttctaaaggatgggcaagtagccaatgattcttaattcttaaagcgtgtgattcagtatctgtttttataatacggagagctatcgtgctgagcggaacagagctttggctgtgacgaag

SEQ ID NO: 793 - DNA, 174 bp, synthetic construct
  misc_feature 1..174: note = Description of Artificial Sequence: Synthetic polynucleotide
  source 1..174: mol_type = other DNA
acgcgaggctgaacctcctgaatcactgcatctttcttgaggcgtttaaagaagagaatagtggccagggcctcggtggggtccagcgtgaggtcttatttttgaaaagggatattataaaacaggtcattgctcggattgtggcagccgatagcaccctagatctagtgaatc

SEQ ID NO: 794 - DNA, 174 bp, synthetic construct
  misc_feature 1..174: note = Description of Artificial Sequence: Synthetic polynucleotide
  source 1..174: mol_type = other DNA
gcctcgaactggcttttcagattgtccacggtccagggcacaaagtcctccatctttggagttctgcccgcgatctgtgccacctctgttacgccactcctcgtgagggggcagctggacagtctttttccggtcagggggtttggctcgtttgcgctcgtgactttgtgagcc

SEQ ID NO: 795 - DNA, 174 bp, synthetic construct
  misc_feature 1..174: note = Description of Artificial Sequence: Synthetic polynucleotide
  source 1..174: mol_type = other DNA
tgatagtttgattgatataagagcgagagtggcctccaccggtcaataccccgaggtgtgtgacattcatccagctactggattagacgaatgcgaagctgaggaaatagtcagggttgggaaccttttgtcatacctttaggtcctcttttatcctcctttatagggaacctc

SEQ ID NO: 796 - DNA, 174 bp, synthetic construct
  misc_feature 1..174: note = Description of Artificial Sequence: Synthetic polynucleotide
  source 1..174: mol_type = other DNA
acaactccgactgtccgctggtggccatcgtcgagagcggccccgacggctgcatcggaccccgctcggtcgtggtttacgaccgagacgttttttccatcctctactcggtcctgcagcacctcgcccccagactagcgggcggcgggagcgacgcgcccccgtaggcccgcc

SEQ ID NO: 797 - DNA, 174 bp, synthetic construct
  misc_feature 1..174: note = Description of Artificial Sequence: Synthetic polynucleotide
  source 1..174: mol_type = other DNA
catacgcaggggctggacgtggttaccggtcactggactcggtttcgctgtagctgtggttcaacctgaacatggctcccagagctgctaggaaccggtccagtcacattttttggtgggtggggggtactaaaaaagtatttaatattggggtttaatgataaaatccaggtt

SEQ ID NO: 798 - DNA, 174 bp, synthetic construct
  misc_feature 1..174: note = Description of Artificial Sequence: Synthetic polynucleotide
  source 1..174: mol_type = other DNA
ttgctctcatgcttataattataattttgatcatctttatcttcagaagagaccttctctgtccacttggagccctttgtatactcctactgatgagtaagtattacaccctttgccccacaccccctttcccttactcttccttctctaacgcactttctcctctttccccag

SEQ ID NO: 799 - DNA, 174 bp, synthetic construct
  misc_feature 1..174: note = Description of Artificial Sequence: Synthetic polynucleotide
  source 1..174: mol_type = other DNA
tcggttatcttatgtctgattcttattctacacatcttcaatgttcgatatgggggtacgaagccctgaattttacaccgattccagcacttttttgcgttgcttaaaaacagtaatttagtcggcacacgtacaatattaaactaggcttcttctaattgcgcagtgtttaaa

SEQ ID NO: 800 - DNA, 174 bp, synthetic construct
  misc_feature 1..174: note = Description of Artificial Sequence: Synthetic polynucleotide
  source 1..174: mol_type = other DNA
aaacatatgtaaatgacagtagagatgttagaagacaaccaatcaggtataggcacgcccaattacaaagacacgaaattggtcaaatacttttaaatgatctgcaacaattgctttccattataactatttcagatttagagaaggatccatattctgtatttcgggtgtaac

SEQ ID NO: 801 - DNA, 174 bp, synthetic construct
  misc_feature 1..174: note = Description of Artificial Sequence: Synthetic polynucleotide
  source 1..174: mol_type = other DNA
aagacataggactaaccgctttgggggacaacattgaaaatgaattgcaggaaatagatttattaactgcggatggtgaagaagaccaggagggcagagacctgcagttggtattttccactggcaatgatgaggtggttgatattatgactatacctatacgtgcaggcgggg

SEQ ID NO: 802 - DNA, 174 bp, synthetic construct
  misc_feature 1..174: note = Description of Artificial Sequence: Synthetic polynucleotide
  source 1..174: mol_type = other DNA
cacccacaccggaggtgagctccgaggtcctcagtcatctgggatttattacggtccctgggaggtggtggggttaatagctttaggcttagtagcgggtgggcttttggctctttgctacctatacctcccttgcttttcctacttagtggtgctttgttgctggtttaagaa

SEQ ID NO: 803 - DNA, 174 bp, synthetic construct
  misc_feature 1..174: note = Description of Artificial Sequence: Synthetic polynucleotide
  source 1..174: mol_type = other DNA
acaataaaatattcggtaacaatgatctctggagacttaccaggagtttggacagctcaatgacagtgtccatctcgtcgcttgtcagctttctgtgtgggtaaaaaaaggactattaaacattgagtcttggcgaagacgagcagttttgtttttgagtttgttttctaaaag

SEQ ID NO: 804 - DNA, 174 bp, synthetic construct
  misc_feature 1..174: note = Description of Artificial Sequence: Synthetic polynucleotide
  source 1..174: mol_type = other DNA
gacattgcagtttcttccccttcctcttctgaaacatcgaacgatgagtgatttcgcccatgtaacaagaactgggatgaaccctggggcaacagactgcggggaggaggggggcagtgataagtcatgacaattttagatgaggtagaaattttgcatattttcagacccacc

SEQ ID NO: 805 - DNA, 174 bp, synthetic construct
  misc_feature 1..174: note = Description of Artificial Sequence: Synthetic polynucleotide
  source 1..174: mol_type = other DNA
ggttttgttgtcgttttggaatgtcccatgtcggagatgtcgttaccggtgtttgctttacttgtgcacgaataagaaaacagagtttggagttttggaagttaatggataacatcaagtttccattgcgttcctcgtgcattttaggccagaaaatcgaccacaaaatcgaga

SEQ ID NO: 806 - DNA, 174 bp, synthetic construct
  misc_feature 1..174: note = Description of Artificial Sequence: Synthetic polynucleotide
  source 1..174: mol_type = other DNA
ctgtaccctctacatctttatcaggttatattcctgcaaatacaacaattccttttggtggtgcatacaatattcctttagtatcaggtcctgatatacccattaatataactgaccaagctccttcattaattcctatagttccagggtctccacaatatacaattattgctg

SEQ ID NO: 807 - DNA, 174 bp, synthetic construct
  misc_feature 1..174: note = Description of Artificial Sequence: Synthetic polynucleotide
  source 1..174: mol_type = other DNA
tgtagcgtcccctgctattgttcccggggggcttctggctaagcagtttggtgataatatgaaagagtatttacaactagaacttagagaagaacttagagccaagggcatgtcaattgatgatgccattcttaatttgctacaggtgacacaggagcaagatattttgacatt

SEQ ID NO: 808 - DNA, 174 bp, synthetic construct
  misc_feature 1..174: note = Description of Artificial Sequence: Synthetic polynucleotide
  source 1..174: mol_type = other DNA
tctcctgaccacgcttagccctggctctgaattgtcagctgtagtggcccaggacttaagtgactttttgcagctgacacttagacgccagctaagggctgagggcagaaccttattaaattttgttgttttaaacacgctgcaggtggtggagcagcaggatctgtttctatt

SEQ ID NO: 809 - DNA, 174 bp, synthetic construct
  misc_feature 1..174: note = Description of Artificial Sequence: Synthetic polynucleotide
  source 1..174: mol_type = other DNA
tctatctaataatagttgccaacaattattagacatagagacgtgacaaccgactacggtgcatataaaagagctgatcagcacagatttgaaggagactgatggagcctcagagagctaaaaatttggtggactattgcaagcaacaacagattagtttttttgaattagagc

SEQ ID NO: 810 - DNA, 174 bp, synthetic construct
  misc_feature 1..174: note = Description of Artificial Sequence: Synthetic polynucleotide
  source 1..174: mol_type = other DNA
acagactttcccgttagtggtttcctctcctcagggaggtcgtccatatccgtgctggttgtggaggtgcttgattcgtcgtccgagctccccaagtcccacctgcctcccctagtcacagaggccttttctccgccgcgccccaccgagtccgctccaaaaccgccttctgcc

SEQ ID NO: 811 - DNA, 174 bp, synthetic construct
  misc_feature 1..174: note = Description of Artificial Sequence: Synthetic polynucleotide
  source 1..174: mol_type = other DNA
gtcatggccaaatttctagatttgcatgaaatattgaaggatgcttaatacatggggaaaataaacgcattaataagtcgtcagggggtggatcactccaaactcctcctatatcccacgataaatggtctaaatacttcacgcgtgtgccttggtttgcaaccttagatcaat

SEQ ID NO: 812 - DNA, 174 bp, synthetic construct
  misc_feature 1..174: note = Description of Artificial Sequence: Synthetic polynucleotide
  source 1..174: mol_type = other DNA
cttcatccacaaacagaagattaaaatcttgacctcggataccctggaacgatagaaagatatatagttaccccaccaaagtttaaatgtatccttaaataccacgtacgtaaaaaatgtttgaatacgtacatatttcttttttttttccagtacaaccatatccggtgtata

SEQ ID NO: 813 - DNA, 212 bp, synthetic construct
  misc_feature 1..212: note = Description of Artificial Sequence: Synthetic polynucleotide
  source 1..212: mol_type = other DNA
tagcaccacccgatcgtaaactccatgtattggttacccatctgcatcgaaaactctccgaacactaggtgcagtaaggctttcatggagtggtttgctatttagcgtacgtgtaccataggcagccccaaaaacacgtgtgaggagaaagtcccagtcactttgggcaaagtagacagccgcgcttgcgtggtgggacttaattaatgcct

SEQ ID NO: 814 - DNA, 174 bp, synthetic construct
  misc_feature 1..174: note = Description of Artificial Sequence: Synthetic polynucleotide
  source 1..174: mol_type = other DNA
attctctatggcctcctagcaaggacaacatcgtaacgttctccattgcttattgcttgtgcgcttgccttcttactgctttactgtgcgtatgcatacacctgcttgtaaccactcgcatcaaaaacgccaataacaaagaaaaaatgccttaacctctttctgtttacagac

SEQ ID NO: 815 - DNA, 174 bp, synthetic construct
  misc_feature 1..174: note = Description of Artificial Sequence: Synthetic polynucleotide
  source 1..174: mol_type = other DNA
tcagtcgcggttagtgacgtactcggacccttttcccttaaagagcctgacgggtgtgcgcgagtacatccagatttgagcgtcgagcggaggacgcggaataaaacgtgtcgcacaaagaactctctttctctgcttcttttctggggtgtctagctggcggcctcttttgac

SEQ ID NO: 816 - DNA, 174 bp, synthetic construct
  misc_feature 1..174: note = Description of Artificial Sequence: Synthetic polynucleotide
  source 1..174: mol_type = other DNA
atcaaatccatatttgtaagttatgtttaacccctcccctttttgtcattatctccgccctcttataatcggatcactttataagtgtgtcggtgagtatattttgtacagttgttggacaacaggtttttggttcattaacactatcaacataagtcggggtatacaagtata

SEQ ID NO: 817 - DNA, 590 bp, synthetic construct
  misc_feature 1..590: note = Description of Artificial Sequence: Synthetic polynucleotide
  source 1..590: mol_type = other DNA
taattcctgcaggttcagggttcttaaatctgtttctctataagaacactcatttttcacgctttctgtcttctttcttccagggctctccccttgccctaggctctggccgttgcgcccggcggggtcaactccatgattagcatggagctgtaggagtctaaattggggacacagatgtttggaacgtcaccttgcagtgttaacttggctttcatgaatctctttgatcttccacaaggggtaggctacgggtgaaacctcttaggctaatacttctatgaagagatgccttggatagggtaacagcggcggatattggtgagttgttaagacaaaaaccattcaacgccggaggactgactctcatccagtggatgcattgagtggattgactgtcagggctgtctttaggcttaattccagacctctctgtgcttagggcaaacatcatttggccttaaatgggattctgtgagaggggatccctccattgacagctggactgttctttggggccttatgtggtgtttgcctctgaggtactcaggggcatttaggtttttcctcattcttaaataataatgaac

SEQ ID NO: 818 - DNA, 174 bp, synthetic construct
  misc_feature 1..174: note = Description of Artificial Sequence: Synthetic polynucleotide
  source 1..174: mol_type = other DNA
ttcttgacttttttctttggaggtaaaggcacagcttccagttcttcttcgctttcggaatccagaaagtatctgcccatttttggcggcggcggctgagcgctgcggtctggggtgcgctccctctgtgagtgctgattgctggccattatttaatcctaggcaaagaaacac

SEQ ID NO: 819 - DNA, 174 bp, synthetic construct
  misc_feature 1..174: note = Description of Artificial Sequence: Synthetic polynucleotide
  source 1..174: mol_type = other DNA
tttgcgaaaaacacccagggcgtgtgtgtttttttttggcggggtttttacaccttccgtcattacgtcagtgtaagttgcctttaagtactcagctaggtcagtaagtagttagttactgctgttggcgcttgtactgctgtgctctttgtctactggtaagcgggctaagct

SEQ ID NO: 820 - DNA, 174 bp, synthetic construct
  misc_feature 1..174: note = Description of Artificial Sequence: Synthetic polynucleotide
  source 1..174: mol_type = other DNA
gacttctgtttttagtccaattataataaaggattgtttatgcgtgcagacgacaatttctacaactcagatgctgccaggtacaaagagctcagcgatatttccggtatatgaccttcgtaagctgctcagtgcacttgtcatttcggaaggtagcgtcagattcgatatata

SEQ ID NO: 821 - DNA, 174 bp, synthetic construct
  misc_feature 1..174: note = Description of Artificial Sequence: Synthetic polynucleotide
  source 1..174: mol_type = other DNA
aagcttacttgctatctgatttgattggtagacctttgagtgaaatcgcaattcgctgtgaaaattgtatgtgtttgttggattatattgaaaagtacgattgtatttgtcacggtggttattttcatttagttagaggtaattggaggggctgttgtagaaattgttacgaac

SEQ ID NO: 822 - DNA, 174 bp, synthetic construct
  misc_feature 1..174: note = Description of Artificial Sequence: Synthetic polynucleotide
  source 1..174: mol_type = other DNA
tctgacgcataataattgttggcaacaatcgtgcataataacttaggaaccgagacagtatcatataaatactgctgaacagtagatttcttcagaagctgatggagccacaatttcctactgatttggattcatactgcaaatattttaacataagcttttttgacttagttc

SEQ ID NO: 823 - DNA, 174 bp, synthetic construct
  misc_feature 1..174: note = Description of Artificial Sequence: Synthetic polynucleotide
  source 1..174: mol_type = other DNA
aaaattgttttaaaaagggccctaagactattgaaatagtgtatgatggcaatcctgaaaatacaatgttatacactatttggacacatatatattttgaagatgacgaaggcaactggcaaaagactgagggacatttggactatcatggtgcctattttatggatggattaa

SEQ ID NO: 824 - DNA, 174 bp, synthetic construct
  misc_feature 1..174: note = Description of Artificial Sequence: Synthetic polynucleotide
  source 1..174: mol_type = other DNA
gaaaatttgtaagacgctgaactttgtctcgatctagccacgcaaacgggatcgactgcgctttcaaatccatcttttagaaaacaaactcaaaaacaaaactgctcgtcttcgccaagactcaatgtttaatagtcctttttttacccacacagaaagctgacaagcgacgag

SEQ ID NO: 825 - DNA, 232 bp, synthetic construct
  misc_feature 1..232: note = Description of Artificial Sequence: Synthetic polynucleotide
  source 1..232: mol_type = other DNA
gcctccaggaccccccctcccgggagagccatagtggtctgcggaaccggtgagtacaccggaattgccaggacgaccgggtcctttcttggataaacccgctcaatgcctggagatttgggcgtgcccccgcaagactgctagccgagtagtgttgggtcgcgaaaggccttgtggtactgcctgatagggtgcttgcgagtgccccgggaggtctcgtagaccgtgcacc

SEQ ID NO: 826 - DNA, 174 bp, synthetic construct
  misc_feature 1..174: note = Description of Artificial Sequence: Synthetic polynucleotide
  source 1..174: mol_type = other DNA
tcggaatccaaaggacgcagaccacctttggttacggacccctttctcccccccttccgaacaaaaagcagcgggcggggggccggggtgagggagggacacgggggacacggcgcgggggtcccgcctcacgccccgcgccctctaaatcccccccgttgctttgtcaagcag

SEQ ID NO: 827 - DNA, 174 bp, synthetic construct
  misc_feature 1..174: note = Description of Artificial Sequence: Synthetic polynucleotide
  source 1..174: mol_type = other DNA
gtggccccctaccaaggaaaacatggttgggttttctttggcttttgtgatcatggcctgctttatgtcaggtctgctggtaggagctctagtgtggttcctgaaacgcaagcccaggtatggaaatgaggagaaggaaaaattgctataaattctttttcttttcacagcacc

SEQ ID NO: 828 - DNA, 174 bp, synthetic construct
  misc_feature 1..174: note = Description of Artificial Sequence: Synthetic polynucleotide
  source 1..174: mol_type = other DNA
tataattacttttttacatgtgtcccaatccctgttaaaagtatatatattatatgtgtgtgtgttttatattcctatggcactggtacattaccatgctaccttgcaagtaacataaatattttcatatatatacaataaatttattgtttgtgtaccagtgtgtagtttacc

SEQ ID NO: 829 - DNA, 174 bp, synthetic construct
  misc_feature 1..174: note = Description of Artificial Sequence: Synthetic polynucleotide
  source 1..174: mol_type = other DNA
atgataaatataagtttttgtacagtagaattgcaatatttgaatttaaacataagttcccattcaaagaggatggtacccctgtatttcaacttactgaccaaagctggaaatctttttttgaaaggctttggacacaattagagctcagtgacccagaagacgaggcagaca

SEQ ID NO: 830 - DNA, 174 bp, synthetic construct
  misc_feature 1..174: note = Description of Artificial Sequence: Synthetic polynucleotide
  source 1..174: mol_type = other DNA
gacctcctcctcctcatcatcgagggtagaggtggtggtagctggactgggtggtggggtggttaagctctcctcctcgtcgctgctgggggcgaggtgtgatggcgcttgcagcgatgttggcagtgatggctgagtttccatgtctgttgtttctctgcctaggagaacaca

SEQ ID NO: 831 - DNA, 174 bp, synthetic construct
  misc_feature 1..174: note = Description of Artificial Sequence: Synthetic polynucleotide
  source 1..174: mol_type = other DNA
ccatgcgcaggcgcctgagtggcgggttcctgcctgcgcttatccccataatcgccgcggccattggcacgatcccgggcatagcttccgttgcgctgcaagcgtcgcagcgccgttaatgtgcaaataaagcctctttagactctgacacacctggtcctgtatatttttaga

SEQ ID NO: 832 - DNA, 235 bp, synthetic construct
  misc_feature 1..235: note = Description of Artificial Sequence: Synthetic polynucleotide
  source 1..235: mol_type = other DNA
ctctaaggtgtttctggaaattgacaaccgccagtgtgttcaagattcagaccagtgtttcaagaacacggatgcagcagcagctcttctggcctctcacgccatccaggggaccttgtcctaccctcttgtgtccgtcgtcagtgaatctctgactcgaaaaggtactcagcttctctatctacttgctgttgccgttgtcattatcctgtttattatcttgctgggagttatc

SEQ ID NO: 833 - DNA, 174 bp, synthetic construct
  misc_feature 1..174: note = Description of Artificial Sequence: Synthetic polynucleotide
  source 1..174: mol_type = other DNA
ccgtcgtgccaaggttcgactggacaacgtcacccagacacactccgggggggaggcccaaatctatctcttgccgccagcgctctggacagccttccagagggtcaccgaggcgcttgtaagcgtggttgccgcgtccaaaaaggtttataccgcaacacgtccaggtgtacc

SEQ ID NO: 834 - DNA, 174 bp, synthetic construct
  misc_feature 1..174: note = Description of Artificial Sequence: Synthetic polynucleotide
  source 1..174: mol_type = other DNA
tagacaatcctgaccgggcaataggactgcattgcatatccttaggtggtattgagaaacctctgccacccaccggcgtggatctctatggggggggccccatagactgggtctatactgcctgatagggtcgcggctggtcgaccactgactgtataaccagttgtactcaac

SEQ ID NO: 835 - DNA, 174 bp, synthetic construct
  misc_feature 1..174: note = Description of Artificial Sequence: Synthetic polynucleotide
  source 1..174: mol_type = other DNA
cacgtagccgcccgcagcacgcggatcttacggcctgcgtcatcacccagggcacgatcctcgcccaattgcacgccatccaaaaatcccgccaagagtttcttctgaaaaagggtaaaggggtctacctggacccccagacgggcgaagtgcttaacccgggtctcccccagc

SEQ ID NO: 836 - DNA, 174 bp, synthetic construct
  misc_feature 1..174: note = Description of Artificial Sequence: Synthetic polynucleotide
  source 1..174: mol_type = other DNA
agttgatcctgccagcggtgggtcgctactgtttcgcgaaccagtcgttttgacagttggttgggatcaaatttgttctgtgcgcgtcacgccactttttgtggcgggaatgtgcgaaaataacaggaaaaagaaccctggaaagggttcaaagaagaaaaagaatgctggaag

SEQ ID NO: 837 - DNA, 174 bp, synthetic construct
  misc_feature 1..174: note = Description of Artificial Sequence: Synthetic polynucleotide
  source 1..174: mol_type = other DNA
ttatgcgggtgatttattgaacggctttttttgtttagtcgtgtgttgcatgtattttggtgtgtgattagacaatttatcgtgcttgttttggtggacaccaataaaattttttgcagtattaatgtttttcaaatttgtgtttatttgctctgagccgggcagttcatcgtt

SEQ ID NO: 838 - DNA, 174 bp, synthetic construct
  misc_feature 1..174: note = Description of Artificial Sequence: Synthetic polynucleotide
  source 1..174: mol_type = other DNA
tctcctctgtagtttctttacaactgtatgcgcgccttaattttagttggaataagtatactgatgatcttcccgaatatccaaacccccaggatgatttacccctaaatattgtatttccagagcccccgcgtcctccttctgttgttagctattttaagttcaccggtgaag

SEQ ID NO: 839 - DNA, 174 bp, synthetic construct
  misc_feature 1..174: note = Description of Artificial Sequence: Synthetic polynucleotide
  source 1..174: mol_type = other DNA
gcataggtagagctcgcatgctgcttagctttgtttcagaagatcagagggaaaaatttatcaatgttatgaaattacctaagggtgttgattggtcctttggtagctttgatagtctttaactactaacatttcatttttttatactaataactaacccactttatatattgt

SEQ ID NO: 840 - DNA, 174 bp, synthetic construct
  misc_feature 1..174: note = Description of Artificial Sequence: Synthetic polynucleotide
  source 1..174: mol_type = other DNA
agtacccggaaactgccaaggcaataagtgccctgcagctgtgtttatttaatgtgacgtcatgtaataaaattatgtcagctgctgagtgttttattacttcttgggtggggacttggatatataagtaggagcagatctgtgtggttagctcacagcaacctgctgccatcc

SEQ ID NO: 841 - DNA, 174 bp, synthetic construct
  misc_feature 1..174: note = Description of Artificial Sequence: Synthetic polynucleotide
  source 1..174: mol_type = other DNA
atgtacaaagcggtgatgatgatacatggaccaaggtgtctggccatgtggaccatgcaggactatactttacacacgaagggacacgtgtaacctatgttaggtttgcacaggaagcacagacatatgggaacactggcacctgggaggtgcatgtgggaggacagctaattt

SEQ ID NO: 842 - DNA, 174 bp, synthetic construct
  misc_feature 1..174: note = Description of Artificial Sequence: Synthetic polynucleotide
  source 1..174: mol_type = other DNA
attgttatttagtagaataaacatctttttatataacaaaaacacaaagtacatgactttagaaagccaactaaatgcattattatttaaaaattacagaatcaacgagtaatgtcactatagttttttaaagtaacttttaattgttcacttctagttgtaatcaaaagaagg

SEQ ID NO: 843 - DNA, 174 bp, synthetic construct
  misc_feature 1..174: note = Description of Artificial Sequence: Synthetic polynucleotide
  source 1..174: mol_type = other DNA
cgagccacagcccctagccgtagacgaggtccatcacgccgtagacgtcgacgcaaagccactttagccccagcggcagtacgtcgcgttgtacaaagggggcgcacactaatacttccatccgtgcgttaccaccctagcattctctaacaagctgcgctgccgttttttcag

SEQ ID NO: 844 - DNA, 174 bp, synthetic construct
  misc_feature 1..174: note = Description of Artificial Sequence: Synthetic polynucleotide
  source 1..174: mol_type = other DNA
cttcgggagacggaggcaaaactggaacgcgatccggcacttgaacattcttgcgcaacttctttttgggaggaagtgacggggcccgttctggactcgtctcctgcaagtagggagtgatggtggggagttcttgctgacggccggccatgctttactcctaggcgagaaaat

SEQ ID NO: 845 - DNA, 174 bp, synthetic construct
  misc_feature 1..174: note = Description of Artificial Sequence: Synthetic polynucleotide
  source 1..174: mol_type = other DNA
acggcggctcttggattcggcattggtgcgccgcgtcttggcctgcatgatcatcgtcatcatgatcgccattagcatctggatcctgacctacgtgctgtttctctaataagaaccccggcccctgacggtaattttcctttcttctccgtttctcctcagctgccgtacgtg

SEQ ID NO: 846 - DNA, 174 bp, synthetic construct
  misc_feature 1..174: note = Description of Artificial Sequence: Synthetic polynucleotide
  source 1..174: mol_type = other DNA
tatatgtattgtatacacagtgtatgtagacacatgtagtgggtttgtgggtgtcatacatttattgggtgtggggtattcattatagtggtgtggtttggtgttttgtttttggctttttgtatggtttgtatttttcatttttttacattatattgctaaataaattttagt

SEQ ID NO: 847 - DNA, 174 bp, synthetic construct
  misc_feature 1..174: note = Description of Artificial Sequence: Synthetic polynucleotide
  source 1..174: mol_type = other DNA
cggtgagtgtcttcccgtactgggggaggcccaaggcgggtacgccctggtctgtagcatgtatctgcacgttatcgtctccatctattcgacaaaaacggtgtacaacagtatgctatttaaatgcacaaagaataaaaagtacgactgcattgccaagcgggtgcggacaaa

SEQ ID NO: 848 - DNA, 174 bp, synthetic construct
  misc_feature 1..174: note = Description of Artificial Sequence: Synthetic polynucleotide
  source 1..174: mol_type = other DNA
actgtcggtggtgctttttaatcacggtgaccagtttttttacggtcacgccggcatggccgtagtccgtcttatgcttataagggttgtttttcctgttgtaagacaggcttctaatgtttaaatgtttttttttgttattttattttgtgtttaatgcaggaacccgcagac

SEQ ID NO: 849 - DNA, 174 bp, synthetic construct
  misc_feature 1..174: note = Description of Artificial Sequence: Synthetic polynucleotide
  source 1..174: mol_type = other DNA
ggagctcttataatttttatttgttcagaaaaggttttaaaatgaaccattgaagcatcttgcaaatacactgaaacgttttgtgcaaagtggcaatccaacaaattttgtccaaaccattccaaaaataattgatcattttgaagctgagtttccatttgacagatccccaca

SEQ ID NO: 850 - DNA, 174 bp, synthetic construct
  misc_feature 1..174: note = Description of Artificial Sequence: Synthetic polynucleotide
  source 1..174: mol_type = other DNA
tggactgaccgcttttttgggggcgcccggggaggcggcggcgacggggacggggacgacacgtcctccatggttgggggacgtcgcgccgcaccgcgtccgcgctcgggggtggtttcgcgctgctcctcttcccgactggccatttccttctcctataggcagaaaaagatc

SEQ ID NO: 851 - DNA, 174 bp, synthetic construct
  misc_feature 1..174: note = Description of Artificial Sequence: Synthetic polynucleotide
  source 1..174: mol_type = other DNA
cgcttatgtttgtttgccttattattatgtggcttatttgttgcctaaagcgcagacgcgccagaccccccatctataggcctatcattgtgctcaacccacacaatgaaaaaattcatagattggacggtctgaaaccatgttctcttcttttacagtatgattaaatgagac

SEQ ID NO: 852 - DNA, 174 bp, synthetic construct
  misc_feature 1..174: note = Description of Artificial Sequence: Synthetic polynucleotide
  source 1..174: mol_type = other DNA
cgatgactcggcagacgacagcagcgtcctggatttgggagggagtggcaacccgtttgcgcaccttcgccccaggctggggagaatgttttaaaaaaaaaaaagcatgatgcaaaataaaaaactcaccaaggccatggcaccgagcgttggttttcttgtattccccttagt

SEQ ID NO: 853 - DNA, 174 bp, synthetic construct
  misc_feature 1..174: note = Description of Artificial Sequence: Synthetic polynucleotide
  source 1..174: mol_type = other DNA
ggccgacactcgcgatggcctcggttccagggctgtaatcactttaacctagccaacgactatttgactcgccaccggcgtgagactgtggactggggcctgttggagcagtaaaggcaataactcgtgtgctttgtaaatttccgcccctagcggtcaaccccgtacaaggcc

SEQ ID NO: 854 - DNA, 174 bp, synthetic construct
  misc_feature 1..174: note = Description of Artificial Sequence: Synthetic polynucleotide
  source 1..174: mol_type = other DNA
acggaaaacagcggaaagtattatttcaaacgagaagatgtgaattccaccttttattactcttgttacaacctgaccgtgacctaaacgcatgtaaagttccacagagccgcgtggctgtagctattgtgtttacgttgcttttgaaatgttaagcgtccctacggcgctaac

SEQ ID NO: 855 - DNA, 174 bp, synthetic construct
  misc_feature 1..174: note = Description of Artificial Sequence: Synthetic polynucleotide
  source 1..174: mol_type = other DNA
agtttagtgatgcactgccacttctcatcaaaattgtccataaatttcaagtttttcaccatgtcagcaatctgatcggctctgacgtaggtggaaggatacttgtaagtttcatactcataatctatcagtctgttccacactacgcagtccgaagagggatgtagtccttta

SEQ ID NO: 856 - DNA, 174 bp, synthetic construct
  misc_feature 1..174: note = Description of Artificial Sequence: Synthetic polynucleotide
  source 1..174: mol_type = other DNA
agcgatggcttacttgaaatctaaaagtatgtctctggtgtagttgtttagcaatacctcggtcccctcctcccagctctggtactccagtccccggcgggcggcgaacttcctccacaccttgaaagggatgtcaaattcctggtccacaattttcattgtcttccctctcag

SEQ ID NO: 857 - DNA, 174 bp, synthetic construct
  misc_feature 1..174: note = Description of Artificial Sequence: Synthetic polynucleotide
  source 1..174: mol_type = other DNA
aaccagggacgtttggcctgctgcagcttcctttatacaaggagtaggtaacttcttatctaatactgcccaggggatattcggctcagcggtaagcctcctattctatgcaaaacctattttgataggaataggagttatactgcttattgcccttctttttaagataatatc

SEQ ID NO: 858 - DNA, 174 bp, synthetic construct
  misc_feature 1..174: note = Description of Artificial Sequence: Synthetic polynucleotide
  source 1..174: mol_type = other DNA
acattatgcgattagatgaattcaaatatctgcaaaccagaacaatgtatgtgtactttaacaagccatttcctcttaaaggaaatgggcaaccgttatattacattgatggttatacatggaactctttttttaggaaattttggcgtcacctaaatctaaaagaccctgagg

SEQ ID NO: 859 - DNA, 422 bp, synthetic construct
  misc_feature 1..422: note = Description of Artificial Sequence: Synthetic polynucleotide
  source 1..422: mol_type = other DNA
tagtggttagcctaccaccccttggccactaattcttggctttctgttttgggatccaccatatcttggaggtggtgctgaaatattgcaagccacatggtatctgtgtgttttctaaacatgaagctttggttcagtggttttggacaaggaaaggctagtgtttggtctgggtacaaacccttgttgtgaaacggattaccggtagtagcatctagtggttccagtccataacatgagtgtatggtctagagtggacatagcttggatacagacaccttcagtattactgggtgttccagactagttcctgaggtaccaagttatgaggggctatgggaaaacccctttgatccacactgcctgatagggtcgcggctggtcgagtcccatacactataaaaccagttgactttcatgca

SEQ ID NO: 860 - DNA, 174 bp, synthetic construct
  misc_feature 1..174: note = Description of Artificial Sequence: Synthetic polynucleotide
  source 1..174: mol_type = other DNA
gaaaccctaaacgttcctgctctcacagatcacgggaccctgccgctgcgcagcagtatccggggagtccagcgcgtgaccgttactgacgccagacgccgcacctgcccctacgtctacaaggccctgggcatagtcgcgccgcgcgtcctctcgagccgcaccttctaaaaa

SEQ ID NO: 861 - DNA, 174 bp, synthetic construct
  misc_feature 1..174: note = Description of Artificial Sequence: Synthetic polynucleotide
  source 1..174: mol_type = other DNA
cagacaagcaccccacccatcccagaaaccgcacggccgagaatcgatccccagcattcaaaatgcgttattaagaaaaaacatatgatgaagattaaaaccttcatcaacattgcacagactttgatccttaggagtttattctagctatctacaaaacgggtccaaaacgga

SEQ ID NO: 862 - DNA, 174 bp, synthetic construct
  misc_feature 1..174: note = Description of Artificial Sequence: Synthetic polynucleotide
  source 1..174: mol_type = other DNA
cgaacactgccccgatccagtgttaatttggggcagaggttcagtctgtgtttactctcaaacctatgatgccgctagatggctaccagaacggttagtaagacaggtgtctaacaataaccaatccagggagtgattctctccctgagatcgctctttcccttgttcacagat

SEQ ID NO: 863 - DNA, 174 bp, synthetic construct
  misc_feature 1..174: note = Description of Artificial Sequence: Synthetic polynucleotide
  source 1..174: mol_type = other DNA
cacagtttacctgctttacggatttgtcacccttatcctcatctgcagcctcgtcactgtagtcatcgccttcattcagttcattgactgggtttgtgtgcgcattgcgtacctcaggcaccatccgcaatacagagacaggactatagctgatcttctcagaattctttaatt

SEQ ID NO: 864 - DNA, 174 bp, synthetic construct
  misc_feature 1..174: note = Description of Artificial Sequence: Synthetic polynucleotide
  source 1..174: mol_type = other DNA
gtggatcccatggacgagcccacccttctttatgttttgtttgaagtctttgacgtggtccgtgtgcaccagccgcaccgcggcgtcatcgagaccgtgtacctgcgcacgcccttctcggccggcaacgccacaacataaaagaagcaagcaacatcaacaacagctgccgcc

SEQ ID NO: 865 - DNA, 174 bp, synthetic construct
  misc_feature 1..174: note = Description of Artificial Sequence: Synthetic polynucleotide
  source 1..174: mol_type = other DNA
tgtggcttgcccttctcttgttcctggtggtcctatggctaaaaatttcggagaagatatgaatgagtacatacagttactgctaagggaggagcttagggattgcggcagagcaattgatattccacttgttaatctactacaggtgaaccaggagcagaatctgttggaatt

SEQ ID NO: 866 - DNA, 174 bp, synthetic construct
  misc_feature 1..174: note = Description of Artificial Sequence: Synthetic polynucleotide
  source 1..174: mol_type = other DNA
taacctgtaaattagatgatggtgatacatggatggcattatggatgttacttacatttataactgtattgttactgttattggcgtttcattgtaggacattatatgtatacaaatatagtaagtaaaatactgtgtattaaataaatatttttatatttgcagcgccttgtt

SEQ ID NO: 867 - DNA, 174 bp, synthetic construct
  misc_feature 1..174: note = Description of Artificial Sequence: Synthetic polynucleotide
  source 1..174: mol_type = other DNA
tgtttgtgttatatagacatcttggtgtattgtaacataatatgtggtagcctgtacggatcccacatagggggttgtatatcatatgttgttgttgtgtgtaccctagtgtgctattgtggcaccattctttttctatttttgtttttttttttacagttaaataaagcaacc

SEQ ID NO: 868 - DNA, 174 bp, synthetic construct
  misc_feature 1..174: note = Description of Artificial Sequence: Synthetic polynucleotide
  source 1..174: mol_type = other DNA
accaaaagtacaaatatttgcacagcagagttaaatcctttgctttcaataacaaatttccacttgatgctaatcacaaaccacaatttgaacttactgaccaaagctggaaatctttttttaaaaggctttggacacagttagatctgagtgatcaagaagacgagggagagg

SEQ ID NO: 869 - DNA, 174 bp, synthetic construct
  misc_feature 1..174: note = Description of Artificial Sequence: Synthetic polynucleotide
  source 1..174: mol_type = other DNA
taattctaattgctgtccttggctctagcatgatcctagtgagcatcttcattataatcaagaaaacaaagaaaccaacgggagcacctccagagctgagtggtgtcacaaacaatggcttcataccacacagttagttaattaaaaataaaataaaatttgggacaaatcata

SEQ ID NO: 870 - DNA, 174 bp, synthetic construct
  misc_feature 1..174: note = Description of Artificial Sequence: Synthetic polynucleotide
  source 1..174: mol_type = other DNA
acttgaaatcagcaatacagtctttgtcaaaactttctaccagcagcacctcaccctcttcccaactctggtactctaaacgtcggagggtggcatactttctccacactttgaaagggatgtcaaattttatttcctcttctttgcccacaatcttcatttctttatccccag

SEQ ID NO: 871 - DNA, 174 bp, synthetic construct
  misc_feature 1..174: note = Description of Artificial Sequence: Synthetic polynucleotide
  source 1..174: mol_type = other DNA
agcagcaggacgagcaagctttaagcccttatagaattgtgacagattgtgggcagtgtcacaaaaccttagcattacatgtactagctacggacggggcaataaggtctgtggaacaactgctgtgtggagacctggaattggtgtgtgcaagctgcataagagcccagcgcc

SEQ ID NO: 872 - DNA, 174 bp, synthetic construct
  misc_feature 1..174: note = Description of Artificial Sequence: Synthetic polynucleotide
  source 1..174: mol_type = other DNA
gggacattgcagtttcttccccttcctcttctgaaacatcgaatgatgagtgatttcaaccacgtaacaagaactgggatgaaccctcgggcagtatcagactgcggggaggggcagtgataagtcatgacaattttagatgaggtagacattttgcatattttcagacccacc

SEQ ID NO: 873 - DNA, 174 bp, synthetic construct
  misc_feature 1..174: note = Description of Artificial Sequence: Synthetic polynucleotide
  source 1..174: mol_type = other DNA
tggtcaacatcaaaggttatatcaaggcgcggaacggccttatcaaaacactcgcctccgcggatgcaacccgggtggtgtttgtgcaagaacccgggtgtctttgatctcgggatcctgctgacgtaagcgaccctttgcggtttcggtctccccacctccaccgcacacccc

SEQ ID NO: 874 - DNA, 174 bp, synthetic construct
  misc_feature 1..174: note = Description of Artificial Sequence: Synthetic polynucleotide
  source 1..174: mol_type = other DNA
actgtttgctgacgatgcgaaaagatatggtacaactggagaatgggaagtaaaagttaataaggaaactgtgtttgctcctgtcaccagctccacgcctccagggtcgccaggaggacaagcagacacaaacaccacccccgcgacccccaccacctccacaaccgccgttga

SEQ ID NO: 875 - DNA, 174 bp, synthetic construct
  misc_feature 1..174: note = Description of Artificial Sequence: Synthetic polynucleotide
  source 1..174: mol_type = other DNA
ttgtataagtgatttaggatttaccccagaagtgaaataattcttagaataaaagaccgactagaatatccttaaggctgtctaacgtgccacacagctagggttagcctgacatctggaacaagatcgatactaatatagggatttgtttcatactagctctctgcaaacaca

SEQ ID NO: 876 - DNA, 174 bp, synthetic construct
  misc_feature 1..174: note = Description of Artificial Sequence: Synthetic polynucleotide
  source 1..174: mol_type = other DNA
gaatacggatttgtctccggagtgggtcaagagtttcgattttcgggagcactttgtgtaggcggcgcgtcccaccccctgggccaccagccgcgattcgtctgacgctgctcctatattaagctttcgcgcagcgcgctttatccgactcgctgtcgagacggctttgccggc

SEQ ID NO: 877 - DNA, 174 bp, synthetic construct
  misc_feature 1..174: note = Description of Artificial Sequence: Synthetic polynucleotide
  source 1..174: mol_type = other DNA
gaggcttcctgcccgcgctgatccccatcatcgccgcggcgatcggggcgatccccggcattgcttccgtggcggtgcaggcctctcagcgccactgagacacacacttggaaattgtaataaacccgaatggactctgacgctcctggtcctgtgatgtgtttttgtagacag

SEQ ID NO: 878 - DNA, 174 bp, synthetic construct
  misc_feature 1..174: note = Description of Artificial Sequence: Synthetic polynucleotide
  source 1..174: mol_type = other DNA
ataacgtcgggaatgtgtcagttcaacgctgtcttttttccctaacagtcgtagtatccttaacgcgatcgtagacgtttatgcgagactgccggtaacgctgtcgttatcgttatattttttatttttgttttccatttttaattttatctcggattccgcacagaaaataaa

SEQ ID NO: 879 - DNA, 174 bp, synthetic construct
  misc_feature 1..174: note = Description of Artificial Sequence: Synthetic polynucleotide
  source 1..174: mol_type = other DNA
gagtaaacaggagcatagttgttcttcatcgatgaagtgtgaaacggttctgctattctttgaaagttgaacactttttgatctttccatattaaatagattacaaaaatgatgtgtaatggaactcggaattgtttctaaattctccgtgtcttttttttcccgtgaaataac

SEQ ID NO: 880 - DNA, 174 bp, synthetic construct
  misc_feature 1..174: note = Description of Artificial Sequence: Synthetic polynucleotide
  source 1..174: mol_type = other DNA
acctacatgactagcatcaagcaaactaatttctttgagcaagagagttccgattacaccatgctggtggtagatgacctttgagtcagggtggctacttgctcaggtttctgggcataaattctcctgcctgcctctgctctggtacgttggcttctgctgctgcttgtgatc

SEQ ID NO: 881 - DNA, 174 bp, synthetic construct
  misc_feature 1..174: note = Description of Artificial Sequence: Synthetic polynucleotide
  source 1..174: mol_type = other DNA
ctttgacgcggcgctccgcccaagcgccgcggagttgctgcgcctgccgctatttcaccctaagtgaccccgctccccccggggggcgtggaggggggggctggttggatgtttttgcacaaaaagacgcggccctcgggctttggtgtttttggcaccttgccgcccggcgtc

SEQ ID NO: 882 - DNA, 174 bp, synthetic construct
  misc_feature 1..174: note = Description of Artificial Sequence: Synthetic polynucleotide
  source 1..174: mol_type = other DNA
aatgtagacagctactgtggcaatcgtggtgggagtgattgcgggctttgtaactctaatcattgtttttatttgctacatctgctgccgcaagcgtccaagggcatacaattatatggtagacccactactcagcttctcctactaaaactcagtcattcttatttcagaacc

SEQ ID NO: 883 - DNA, 174 bp, synthetic construct
  misc_feature 1..174: note = Description of Artificial Sequence: Synthetic polynucleotide
  source 1..174: mol_type = other DNA
ccgcaggtcacatgtgttaggtttcacagattctatatattactaactctatactcgtaattaacattagataagtagattaagaaaaaagcctgaggaagattaagaaaaactgcttattgggtctttccgtgttttagatgaagcagttgaaattcttcctcttgatattaa

SEQ ID NO: 884 - DNA, 174 bp, synthetic construct
  misc_feature 1..174: note = Description of Artificial Sequence: Synthetic polynucleotide
  source 1..174: mol_type = other DNA
cgtggacgcggccctcggttgggcgacgcatgccagcccaacaaaatccgccggggtgccagtcccattcccgaaggcgtagcccgttaacttggctggcttggatggggagtagggccttttccattaccccaaggacctagcgcgcgggagtcgtggctttggggcgcatcc

SEQ ID NO: 885 - DNA, 174 bp, synthetic construct
  misc_feature 1..174: note = Description of Artificial Sequence: Synthetic polynucleotide
  source 1..174: mol_type = other DNA
aatttcataaagatgttgaatggtttccggaattggtcgaagatataaataggatcttggtagatgcttggggcaggaaacctaaaatcgtgctgaacgcgtctttctttataaagtggctctcgtcgacaataagcagattgaagctctgtccgcgtatactctgagagggga

SEQ ID NO: 886 - DNA, 174 bp, synthetic construct
  misc_feature 1..174: note = Description of Artificial Sequence: Synthetic polynucleotide
  source 1..174: mol_type = other DNA
ggctacgccttagcccaacaataccatcatctgtacggtcacccctcagaggaaagccttagaaaggtgttgaccaaacgatttgtgtgggaagatatgggacaacattgtaaggaaataactaacacctgtctaacctgtgcaaaatataaagttctcagagcaggaccacca

SEQ ID NO: 887 - DNA, 174 bp, synthetic construct
  misc_feature 1..174: note = Description of Artificial Sequence: Synthetic polynucleotide
  source 1..174: mol_type = other DNA
cctttgtcggaggggtacgtggtcctcttaggagacgggaggtccaagccctcgccgcctccatctgaatttttgctttcggtttttcgccgaaaccgcgccgcgcgtcttgtctgtctcagtattgttttgttatttgtctgttcgttattgttttggaccgcttctaaaaac

SEQ ID NO: 888 - DNA, 252 bp, synthetic construct
  misc_feature 1..252: note = Description of Artificial Sequence: Synthetic polynucleotide
  source 1..252: mol_type = other DNA
gtgcgctgttggttcctgccaacgtcattccgcaggatacccactcgggtggggtagttcctcagctggcaagcatattgggatgcgatgtttccgttctacaggcggcagtggaacagatcctaacatctgtttcggactttgatctgcgcattctggacagctattaagcttgtgattttgtttagggcggaaaaataaattttcctttgtttttccacatcggtgccttcacatatacaagccggcacc

SEQ ID NO: 889 - DNA, 174 bp, synthetic construct
  misc_feature 1..174: note = Description of Artificial Sequence: Synthetic polynucleotide
  source 1..174: mol_type = other DNA
taccagagacgtttggcctgcagcagctagagctcttcaaggcataggtaacgttttgtctaatactgcccagggaatatttggaactacagtaagcattttgtcttatgcaaagcctatcctgataggaataggtgttatacttttgattgcctttttatttaagattgtatc

SEQ ID NO: 890 - DNA, 174 bp, synthetic construct
  misc_feature 1..174: note = Description of Artificial Sequence: Synthetic polynucleotide
  source 1..174: mol_type = other DNA
gtttcttccctccgtaggacccaaatagcggggaggcacgtagggtggcgccgctgccatcacggtttcgtaagagggaggtggtgtctcaggaaaagccactgtctgcagttccaccgcgcgcctcatttcacagctaacggaagaaggaaaataagacgaacactggtcgcc

SEQ ID NO: 891 - DNA, 174 bp, synthetic construct
  misc_feature 1..174: note = Description of Artificial Sequence: Synthetic polynucleotide
  source 1..174: mol_type = other DNA
tggcagattcccaaactaatgaaagttgccatgcaacccgtctcgctcagagatcccgagtacgactaggcttttttttttgtctttcggttccaactctttccccgccccatcacctcgcctatactatgtgtatgatgtctcataataaagctttctttctcagtctgcaac

SEQ ID NO: 892 - DNA, 174 bp, synthetic construct
  misc_feature 1..174: note = Description of Artificial Sequence: Synthetic polynucleotide
  source 1..174: mol_type = other DNA
gtcacaaacataaaattctgtgtaggcgtttcgatcattctcaacctagcgctcggggctgccgaactacacactgaaaacgcagtttttaccgcttcggaaaaaatctccttatcctgctctgtgagattcgccgccgcctgatagaccgccgccaacgtaaggtcgggctcc

SEQ ID NO: 893 - DNA, 174 bp, synthetic construct
  misc_feature 1..174: note = Description of Artificial Sequence: Synthetic polynucleotide
  source 1..174: mol_type = other DNA
aacatgattgcaaatatcaatatttacagagtagagtgacagtgtttgaatttccaaatccatttccatttgacagcaacggaaatgctgtgtatgaattaagtgatgcaaattggaactccttttttaaaaggttggcgtccagtttagagctgcagacaacagaggacgagg

SEQ ID NO: 894 - DNA, 213 bp, synthetic construct
  misc_feature 1..213: note = Description of Artificial Sequence: Synthetic polynucleotide
  source 1..213: mol_type = other DNA
tttgggaatcgcaacacaacatggttacccatagattgaggaaatttccaataaactcagtattaaggcttgttgtgttggacaaggtgccctatttagggtgaggagccttactggcagccccagtgaatcctccattggataggaacagctatattgggtagttgtagcagttgtattcaaatgaatgcagcgttccgaaatatcatacct

SEQ ID NO: 895 - DNA, 174 bp, synthetic construct
  misc_feature 1..174: note = Description of Artificial Sequence: Synthetic polynucleotide
  source 1..174: mol_type = other DNA
actctgttgaaactgccaaggcaatgagtgccctgcagctgtgtttatttaatgtgacgtcatgtaataaaattatgtcagctgctgagtgttttattacttcttgggtggggacttggatatataagtaggagcagatctgtgtggttagctcacagcaacctgctgccatcc

SEQ ID NO: 896 - DNA, 174 bp, synthetic construct
  misc_feature 1..174: note = Description of Artificial Sequence: Synthetic polynucleotide
  source 1..174: mol_type = other DNA
tttgtttttggatgtgcgcgtggaggctttgttggaagccaccgttgagcaccttgaaaatcgcatttcttttgatttagctgtgctttttcaccaacacagtgggggcgatagatgccatctgcgcgatctacaatttgaagtactgcgagatcgtttggaataaaaattaac

SEQ ID NO: 897 - DNA, 174 bp, synthetic construct
  misc_feature 1..174: note = Description of Artificial Sequence: Synthetic polynucleotide
  source 1..174: mol_type = other DNA
atttgtacatgcggaggaaagcgtgtgagtcaaaacggaggctgaaatttaataaagtttgtcacaccactctgtttttttgcaatttcctgtcatgtgacggcgtctcgtatccaggtcttatatttcagatacctcattgtttcacttctagtgttattcggagttttcaag

SEQ ID NO: 898 - DNA, 174 bp, synthetic construct
  misc_feature 1..174: note = Description of Artificial Sequence: Synthetic polynucleotide
  source 1..174: mol_type = other DNA
ttattcttgaatggctgcttatggtgacaatcatagattgttatcataaagcgagttggattggccatccagtgtgaatcagattaattactcccttgtttgttggatccactcccgaaacgttttactccttaacttattgaaattgtttgaagacaggatttcagtgtcaca

SEQ ID NO: 899 - DNA, 174 bp, synthetic construct
  misc_feature 1..174: note = Description of Artificial Sequence: Synthetic polynucleotide
  source 1..174: mol_type = other DNA
gcgggaaagttgtaaataaagcttctgcggttgtgacatcacaggagagtataaagcagttctatgaaaaagagaagtcattactgtccggtgtgaagttttggagactaagtgaaagacattgtcggtttgcgcttgtcggcatctgttttcttttagccttgtatttttgtt

SEQ ID NO: 900 - DNA, 174 bp, synthetic construct
  misc_feature 1..174: note = Description of Artificial Sequence: Synthetic polynucleotide
  source 1..174: mol_type = other DNA
atgttaatgtaacaactgatgaatctctattttatttgagaagtagacttacgtgtttcaattttccgaataagttaccaatgtctgacaaagatgaacctttgtttaccatttctgacaaaagctggacctgtttttttagaaagttttggaatcaattagaacttcaagaag

SEQ ID NO: 901 - DNA, 174 bp, synthetic construct
  misc_feature 1..174: note = Description of Artificial Sequence: Synthetic polynucleotide
  source 1..174: mol_type = other DNA
cttcaacaatcagcattatcgctgcagtgacaattggaatatctattcttgtttttaccataacctactacgcctgctgctatagaaaagacaaacataaaggtgatccattacttagatttgatatttaatttgttctttttttttttatttacagtatggtgaacaccaatc

SEQ ID NO: 902 - DNA, 174 bp, synthetic construct
  misc_feature 1..174: note = Description of Artificial Sequence: Synthetic polynucleotide
  source 1..174: mol_type = other DNA
ccaacaacgcccaatgaaaaaaacattccaaattcaatgattgcaattattgcggcggtggcattgggaatggcactaataataatatgcatgttcctatatgcttgttgctataaaaagtttcaacataaacaggatccactactaaattttaacatttaattttttatacag

SEQ ID NO: 903 - DNA, 174 bp, synthetic construct
  misc_feature 1..174: note = Description of Artificial Sequence: Synthetic polynucleotide
  source 1..174: mol_type = other DNA
gttaacaactatcaggcgattctctagttctaacacgaacgtttacggtcgttgccagctttttccttataaaactctggtgggaatttctcttgggacagatggacctgacatctgtacattcggttcgggatctgagttctgctctccgtatcccatttattgatttggttg

SEQ ID NO: 904 - DNA, 174 bp, synthetic construct
  misc_feature 1..174: note = Description of Artificial Sequence: Synthetic polynucleotide
  source 1..174: mol_type = other DNA
ccataaggtgtaaacctgtgattgcgtgtgtggttaacgcctttgtttgctgaatgagttgatgtaagtttaataaagggtgagataatgtttaacttgcatggcgtgttaaatggggcggggcttaaagggtatataatgcgccgtgggctaatcttggttacatctgacctc

SEQ ID NO: 905 - DNA, 174 bp, synthetic construct
  misc_feature 1..174: note = Description of Artificial Sequence: Synthetic polynucleotide
  source 1..174: mol_type = other DNA
tacgaaagcccaagcctggatgttgactccattatcccccggacaccagatgttttacacgaggatctcttaaatttctaactcccgttattgaaaccacgcctgcttcacgcctcgtttactaatggaatattaataaatatcttcctgttggctctctttgaagtggttgcc

SEQ ID NO: 906 - DNA, 174 bp, synthetic construct
  misc_feature 1..174: note = Description of Artificial Sequence: Synthetic polynucleotide
  source 1..174: mol_type = other DNA
cgtgtcgatcccggggcctgtgtaatataatctcccaaacgtgggagggtgtcagtattggggtccgtgaaggctcgtccctgtcgtccttttagttgaactgatctaaagacccaccagtaaagaggttgtttgtttcccattgtgatagtcattgtgtattattcgtttcta

SEQ ID NO: 907 - DNA, 174 bp, synthetic construct
  misc_feature 1..174: note = Description of Artificial Sequence: Synthetic polynucleotide
  source 1..174: mol_type = other DNA
taaggcagccagccaggcaccatacagcttctacgactgcaaagaagagagctggcacgtggggctcttccagatcaaacacggacctggaggggtctgtacaccaccttgccacgtagcgattagggccgaccgccacgaggaacccatgcaatcgtgactgtccgagcacat

SEQ ID NO: 908 - DNA, 174 bp, synthetic construct
  misc_feature 1..174: note = Description of Artificial Sequence: Synthetic polynucleotide
  source 1..174: mol_type = other DNA
cttttgtttatcgaaatcagagctgtggctcttttagaagctgttgttgaacatttggaaaatcgcttacaatttgatctggctgtgatctttcaccagcacagcggaggcgatcgctgccacctgcgagatttacgcattcaaatccttgctgaccgtcttgattaagttttt

SEQ ID NO: 909 - DNA, 579 bp, synthetic construct
  misc_feature 1..579: note = Description of Artificial Sequence: Synthetic polynucleotide
  source 1..579: mol_type = other DNA
gataaaagaacctataatcccttcgcacaccgcgtcacaccgcgctatatgctgctcattaggaattacggctccttttttgtggatacaatctcttgtatacgatatacttattgttaatttcattgacctttacgcaatcctgcgtaaatgctggtatagggtgtacttcggatttccgagcctatattggttttgaaaggacctttaagtccctactatactacattgtactagcgtaggccacgtaggcccgtaagatattataactattttattatattttattcaccccccacattaatcccagttaaagctttataactataagtaagccgtgccgaaacgttaatcggtcgctagttgcgtaacaactgttagtttaattttccaaaatttatttttcacaatttttagttaagattttagcttgccttaagcagtctttatatcttctgtatattattttaaagtttataggagcaaagttcgctttactcgcaatagctattttatttattttaggaatattatcacctcgtaattatttaattataacattagctttatctatttata

SEQ ID NO: 910 - DNA, 174 bp, synthetic construct
  misc_feature 1..174: note = Description of Artificial Sequence: Synthetic polynucleotide
  source 1..174: mol_type = other DNA
ttccacagccgctcccaatacaattcctaaatcaacaattggcatcattactgccgtggtagtgggattaatgattatatttttgtgtataatgtactacgcctgctgctatagaaaacatgaacaaaaaggtgatgcattactaaattttgatatttaattttttatagaatt

SEQ ID NO: 911 - DNA, 174 bp, synthetic construct
  misc_feature 1..174: note = Description of Artificial Sequence: Synthetic polynucleotide
  source 1..174: mol_type = other DNA
cgcgtgttattgtaggttcgttgccagatggcaagtgctgtcaacagcagacgttgtgggcggtcggtgtatttttgtgggttgcggtgagagtcggcactcggtgttttgtgagtgatctcaacagtttgtgttgcttttagcagcgtccaaaacagcgacgcgactttgggg

SEQ ID NO: 912 - DNA, 170 bp, synthetic construct
  misc_feature 1..170: note = Description of Artificial Sequence: Synthetic polynucleotide
  source 1..170: mol_type = other DNA
gccgctgctgcaattgaagtgcaacttgcatctgttgctactgttgaaggcctaacaacctctgaggcaattgctgctataggcctcactccacaggcctatgctgtgatatctggggctcctgctgctatagctggatttgcagctttactgcaaactgtgactggtgt

SEQ ID NO: 913 - DNA, 174 bp, synthetic construct
  misc_feature 1..174: note = Description of Artificial Sequence: Synthetic polynucleotide
  source 1..174: mol_type = other DNA
ttgcagagcagctcttcggagcctcgctcgggaggcatcggaaccctccagttcgtggaggagtttgtgccctcggtctacttcaaccccttctcgggatcgccaggcctctacccggacgagttcataccgaacttcgacgcagtgagagaagcggtggacggctacgactga

SEQ ID NO: 914 - DNA, 174 bp, synthetic construct
  misc_feature 1..174: note = Description of Artificial Sequence: Synthetic polynucleotide
  source 1..174: mol_type = other DNA
aacacagtttaacacatacagtaagcacagtaatctttttaggaataattggcttcagcattttgattattatagcagcctttatttatctgtgctggcatagaaaatctttgtgtgtttctaaaacagaacctcttatgccgattccttactagttttcttttttcttacagt

SEQ ID NO: 915 - DNA, 174 bp, synthetic construct
  misc_feature 1..174: note = Description of Artificial Sequence: Synthetic polynucleotide
  source 1..174: mol_type = other DNA
aggagaagtattagaagttctaactcgtattcctttgagttctctttctgtacgctgttttgattgccttacattgttatcttttgcagaaaaaatagattgtataattagtggtcaaaacttttatcttgtaaggggtcgctggagatcatattgtagaaattgcattgagaa

SEQ ID NO: 916 - DNA, 174 bp, synthetic construct
  misc_feature 1..174: note = Description of Artificial Sequence: Synthetic polynucleotide
  source 1..174: mol_type = other DNA
gtgtctcaatttgcatcttaatatacaatggagccagcaaaaccctctggaaacaacatgggatccaatgatgaacgtatgcaagagtaagtatgattagtcattattagatctatcttatttaagattatttgggaatttttctaagtacttaaaaaatatttatacttacag

SEQ ID NO: 917 - DNA, 174 bp, synthetic construct
  misc_feature 1..174: note = Description of Artificial Sequence: Synthetic polynucleotide
  source 1..174: mol_type = other DNA
ggacgttctcgggggcagaggtggaggcgattgcgaagggctggggtccgacctggaaggcggatgactggcagaaccccttccgcgttcgggggtgtgctccctgtggcggtcgcttaactgatttccttcgcggctggccattgtgttctcctaggcagagaaacaacagac

SEQ ID NO: 918 - DNA, 174 bp, synthetic construct
  misc_feature 1..174: note = Description of Artificial Sequence: Synthetic polynucleotide
  source 1..174: mol_type = other DNA
ttttaaataatagtaaacttaccagacgtcagccaatcagaggaggtcttgcgtctctacagtcgtccgagtatggagaaaaacttttacatgaccttagagcgttgttcttgatcacttcttctgcagatctggataaagatacatcatctctctttcagatgtgatatagta

SEQ ID NO: 919 - DNA, 174 bp, synthetic construct
  misc_feature 1..174: note = Description of Artificial Sequence: Synthetic polynucleotide
  source 1..174: mol_type = other DNA
gcatgatgaacaagggatgtcagcaagctacacaaagtatagatatttgtgcctaatgcaaaaagctatatttacacatttcaagagagggtgcacttgctggggggaggacatgggccgggaaggattggaagaccaaggacctccccctcctccccctccaggtctagtcta

SEQ ID NO: 920 - DNA, 174 bp, synthetic construct
  misc_feature 1..174: note = Description of Artificial Sequence: Synthetic polynucleotide
  source 1..174: mol_type = other DNA
tctaggttttcagagctttctaaattggagatttcgttttctatgttcgtggggctggtggctgttgtcgtctcggaaggaattggtggttggggagtgaggtagcaatataacagaatctcgtttactatctcagattgtatagacaacgcttctgagtcccatcctttgtac

SEQ ID NO: 921 - DNA, 174 bp, synthetic construct
  misc_feature 1..174: note = Description of Artificial Sequence: Synthetic polynucleotide
  source 1..174: mol_type = other DNA
ggctaaaaaaaatggcgcaatccatagtcgtagatggggactacgacgctcttgctagtagatatcttaaatttgtttatgattttgaaaatgtaacttatcaaaataattacttcgccacagataaatttaaaaaagacatagagcaatatcttaaatcaatccatgatggag

SEQ ID NO: 922 - DNA, 174 bp, synthetic construct
  misc_feature 1..174: note = Description of Artificial Sequence: Synthetic polynucleotide
  source 1..174: mol_type = other DNA
tcttctataaattcagtggtacttgaggtcatttcattatccacacctaccgccgaagaggcctcataagtgacgttgttttctattgcacggggaacatttattaagtgggaggcaaataacaattctgaaaataacaaatcgttttttagcagaagggctggattataagcg

SEQ ID NO: 923 - DNA, 174 bp, synthetic construct
  misc_feature 1..174: note = Description of Artificial Sequence: Synthetic polynucleotide
  source 1..174: mol_type = other DNA
aagacagatggaaatacttatatagtagaattagtttgtttgaatttccaaacccatttccattagataaaaatggaaatcctgtatatgtgttaaatgatgaaaattggaaatcattttttcaaaggttgtggtccagcttagaatttcaagaatcagaggacgaggaagaaa

SEQ ID NO: 924 - DNA, 174 bp, synthetic construct
  misc_feature 1..174: note = Description of Artificial Sequence: Synthetic polynucleotide
  source 1..174: mol_type = other DNA
caactctacgggctattctaattcaggtttctctagaatcggggttggggttattctctgtcttgtgattctctttattcttatactaacgcttctctgcctaaggctcgccgcctgctgtgtgcacatttgcatttattgtcagctttttaaacgctggggtcgccacccaag

SEQ ID NO: 925 - DNA, 174 bp, synthetic construct
  misc_feature 1..174: note = Description of Artificial Sequence: Synthetic polynucleotide
  source 1..174: mol_type = other DNA
attctcaaatgattatattgaccaatacgtcttctaacagggggcaagtattctaaagacatattacccaaaatatctctatgattcctatcccgttatgtatttaatatgtaaagttaaggcgtagcctacaacaaacttcccgtttatcttccaggctctaaattggagaaa

SEQ ID NO: 926 - DNA, 174 bp, synthetic construct
  misc_feature 1..174: note = Description of Artificial Sequence: Synthetic polynucleotide
  source 1..174: mol_type = other DNA
aatgattttgaaacatattaagatgtttatacgagcgtgttgtttactattttcaggatatgtggaagcggttgtgtatgatctatacgcacatttagttcccagagggcgttgtcgtctccccctaagcaagggagaaacacgtggcacatgatcttgcgcttaacgataaaa

SEQ ID NO: 927 - DNA, 174 bp, synthetic construct
  misc_feature 1..174: note = Description of Artificial Sequence: Synthetic polynucleotide
  source 1..174: mol_type = other DNA
tctatgctctcccaaaaccggaggtgagctccgcggtcttcctactgacgacccctgggtggtagcgggttttgtaacgttaggagtagttgcgggtgggcttgtgctgatcctttgctacctatacacaccttgctgtgcatatttagtcatattgtgctgttggtttaagaa

SEQ ID NO: 928 - DNA, 178 bp, synthetic construct
  misc_feature 1..178: note = Description of Artificial Sequence: Synthetic polynucleotide
  source 1..178: mol_type = other DNA
tgatcttgctttcgtaataaaattctgtacataaaagtcgaaagtattgctatagttaaggttgcgcttgcctatttaggcatacttctcaggatggcgcgttgcagtccaacaagatccagggactgtacagaattttcctatacctcgagtcgggtttggaatctaaggttgactc

SEQ ID NO: 929 - DNA, 174 bp, synthetic construct
  misc_feature 1..174: note = Description of Artificial Sequence: Synthetic polynucleotide
  source 1..174: mol_type = other DNA
tagccatatatccataccttgacattggctggaatgccatagatgccatgaaccaccctactttcccagtgcccgctgtcataccactgcaacaggttattgccccaatcaatcagcctcgccccccttctcccacccccactgagattagctactttaatttgacaggtggag

SEQ ID NO: 930 - DNA, 385 bp, synthetic construct
  misc_feature 1..385: note = Description of Artificial Sequence: Synthetic polynucleotide
  source 1..385: mol_type = other DNA
gtatacgagaattagaaaaggcactcgtatacgtattgggcaattaaaaataataattaggcctagggaacaaatccctctcagcgaaggccgaaaagaggctagccatgcccttagtaggactagcataatgaggggggtagcaacagtggtgagttcgttggatggcttaagccctgagtacagggtagtcgtcagtggttcgacgccttggaataaaggtctcgagatgccacgtggacgagggcatgcccaaagcacatcttaacctgagcgggggtcgcccaggtaaaagcagttttaaccgactgttacgaatacagcctgatagggtgctgcagaggcccactgtattgctactaaaaatctctgctgtacatggcac

SEQ ID NO: 931 - DNA, 174 bp, synthetic construct
  misc_feature 1..174: note = Description of Artificial Sequence: Synthetic polynucleotide
  source 1..174: mol_type = other DNA
gctcgtccctctttaacgtcaacgatatttacgaactgttgtactttttagtgttggggtttcttccgagcgtggcggtgttgtaatttccaccacgtgtcgctcgctgcataaagggcgaacgtcctcggagagggtatattcgttcggcgagagcgggcggcggtggtgggt

SEQ ID NO: 932 - DNA, 174 bp, synthetic construct
  misc_feature 1..174: note = Description of Artificial Sequence: Synthetic polynucleotide
  source 1..174: mol_type = other DNA
ggcaaaaaaagcccaacacgcaatgcgtttattgcaattcagttcactggtgcaatgagggtattggggctttttgaacgtgggaataacttgaatttcgcagatacctacgtatatacatggaaccaacagtactcgtatcatgaaaatgcattcctaatttcaaatcaagta

SEQ ID NO: 933 - DNA, 174 bp, synthetic construct
  misc_feature 1..174: note = Description of Artificial Sequence: Synthetic polynucleotide
  source 1..174: mol_type = other DNA
ttgaaaaacatgtttggttagccattcatttttttaaagcatttcaggtttcaaaattaaaccacaaaaataaaacgcttatatctgatttcttaaaggatttcacacagctcttagcagatcaaaactttgaaattgtcgatcctacatttaccattcattattacgtttagc

SEQ ID NO: 934 - DNA, 174 bp, synthetic construct
  misc_feature 1..174: note = Description of Artificial Sequence: Synthetic polynucleotide
  source 1..174: mol_type = other DNA
attatacctggtagagagtcagtgtccattttgccaggctatcatacgatttgtatgcgtagcaagcaacactgggatacggaatctacaggcactcctggtcaacagtcaccttgacctcgcttgtcacgcctgtgtcgagcagaatggcgtccagggtctcagacaccggca

SEQ ID NO: 935 - DNA, 174 bp, synthetic construct
  misc_feature 1..174: note = Description of Artificial Sequence: Synthetic polynucleotide
  source 1..174: mol_type = other DNA
aaccctagccataaccgcataactctgttcacaaccctaacactaatcctcgcatccgcacctaacgctgcccctctttcacaccatcaccccctgccgcttcaacttcaccttcttcctccatctcgccccgcttgtttctacacttgtccgcccctctattcttactctagg

SEQ ID NO: 936 - DNA, 174 bp, synthetic construct
  misc_feature 1..174: note = Description of Artificial Sequence: Synthetic polynucleotide
  source 1..174: mol_type = other DNA
gaaattcccctgtattgtaataagacctcattaacatatttcccctgcttagtactatgcagaaacccccgagcaaattaaaattgatgaagattaagaaaaagagggattttctcaggaaaaatcttttttcttaccttcatctcatttaaacaaatttaggactcaggaaaa

SEQ ID NO: 937 - DNA, 174 bp, synthetic construct
  misc_feature 1..174: note = Description of Artificial Sequence: Synthetic polynucleotide
  source 1..174: mol_type = other DNA
gagaggcaatcttcctcccgtgaaggacacaagcagtagctcacaatcatctcgtgtttcagcaaagtgtgcataattataaagtgctgggtcatctaagcttttcagtcgagaaaaaaacagtagatcagaagaacaactggcaacacttctcatcctgagacctacttcaag

SEQ ID NO: 938 - DNA, 174 bp, synthetic construct
  misc_feature 1..174: note = Description of Artificial Sequence: Synthetic polynucleotide
  source 1..174: mol_type = other DNA
ccccacggaaagagaatatcgtggtcttctccatcgcttacagcttgtgcacggtgctaatcaccgcgatcgtgtgcctgagcattcacatgctcatcgctattcgccccagaaataatgctgagaaagagaaacagccataacaccatttttttcacacacctttttcagacc

SEQ ID NO: 939 - DNA, 174 bp, synthetic construct
  misc_feature 1..174: note = Description of Artificial Sequence: Synthetic polynucleotide
  source 1..174: mol_type = other DNA
atgtatgttggatgtatttacatagtaggataacatgttttgaatttaaacaaccttttccatttgatgaaaatggtcaaccggcattttccttaacagacatcaattggaaatctttttttgaaaggttttggagccagttagacttaagtgaccaagaagacgaggagagtg

SEQ ID NO: 940 - DNA, 174 bp, synthetic construct
  misc_feature 1..174: note = Description of Artificial Sequence: Synthetic polynucleotide
  source 1..174: mol_type = other DNA
agggagtctgggtatcctgggtatttcctgttttgtaggattgaaggaaataatatactttatctttgttagtgttgactacatgtggcctttttgtgatacgttattgactacggcggttaattgtttcttcaaaggccgtacctttcttcgacgtgaattaaaaatttaaaa

SEQ ID NO: 941 - DNA, 174 bp, synthetic construct
  misc_feature 1..174: note = Description of Artificial Sequence: Synthetic polynucleotide
  source 1..174: mol_type = other DNA
ggttcccccccgtggctctcgagatgagccagacccaacccccggccccagttgggccgggcgacccagatgtttacttaaaaggcgtgccgtccgccggcatgcaccccagaggtgttcacgcacctcgaggacacccgcgcatgatctccggacccccgcaacggggtgata

SEQ ID NO: 942 - DNA, 174 bp, synthetic construct
  misc_feature 1..174: note = Description of Artificial Sequence: Synthetic polynucleotide
  source 1..174: mol_type = other DNA
aattcttatactatctgttattctttattttatattctgccgtcaaatacccaatgttcatagaaattctaaaagacgtcccatctattctcctatgattagtcgtccccatatggctctgaatgaaatctaagatctttttttttttctcttacagtatggtgaacatcaatc

SEQ ID NO: 943 - DNA, 174 bp, synthetic construct
  misc_feature 1..174: note = Description of Artificial Sequence: Synthetic polynucleotide
  source 1..174: mol_type = other DNA
gcccacttgcaaactatagaccttaaagacgcctttttccaaatccccctacctaaacagttccagccctactttgctttcactgtcccacaacagtgtaattacggccccggcactagatacgcctggaaagtactaccccaagggtttaaaaacagtcccaccctgttcgag

SEQ ID NO: 944 - DNA, 174 bp, synthetic construct
  misc_feature 1..174: note = Description of Artificial Sequence: Synthetic polynucleotide
  source 1..174: mol_type = other DNA
ctatcgcagatacactccttatgaccctgaggacccagggcaagaaaccaatgtgtccatgtcattcatctggcagtccgccccggatatcgggcgaaagttagagcggttagaagatttaaagagcaagaccttaggagacttagtgagggaagctgaagagatctttaataa

SEQ ID NO: 945 - DNA, 174 bp, synthetic construct
  misc_feature 1..174: note = Description of Artificial Sequence: Synthetic polynucleotide
  source 1..174: mol_type = other DNA
tgccagtcccacgcttagccctggctctgaattgtcagctgtagtggcccaggacttaagtgactttttgcagctgacattgaggcgcgagctcagggcggagggcagaaccttattgaatcttgttgttttgaacacgctgcaggtggtggagcagcaggatctgtttctatt

SEQ ID NO: 946 - DNA, 174 bp, synthetic construct
  misc_feature 1..174: note = Description of Artificial Sequence: Synthetic polynucleotide
  source 1..174: mol_type = other DNA
acagaacaccgcaactcggtgttgtactcgtgttttttattcaacaataaagctttttcacgcttactcgagtgtgacgtgactttatgggggaacgccgtgtgggaatgacggtgattatattacactctataaacggtttctcatacgcgccttttgatagccaccgccgtc

SEQ ID NO: 947 - DNA, 174 bp, synthetic construct
  misc_feature 1..174: note = Description of Artificial Sequence: Synthetic polynucleotide
  source 1..174: mol_type = other DNA
ggctgactatcctgttctgtcctggaaaaactttcagcgtcgtaggtggactttgtagtatgcgggttagtgaagttatgtcatttatttacgtttacgatctcgtattacaaaccgcggagaggatgacaccgttcggccccatgagttatttttattcttccggtaggaggc

SEQ ID NO: 948 - DNA, 174 bp, synthetic construct
  misc_feature 1..174: note = Description of Artificial Sequence: Synthetic polynucleotide
  source 1..174: mol_type = other DNA
tgaaatcagcaataaggtctctgttgaaattttctcccagcagcacctcacttccctcttcccaactctggtattctaaaccccgttcagcggcatactttctccatactttaaaggggatgtcaaattttaactcctgtcctgtacccacaatcttcatgtctttcttcccag

SEQ ID NO: 949 - DNA, 174 bp, synthetic construct
  misc_feature 1..174: note = Description of Artificial Sequence: Synthetic polynucleotide
  source 1..174: mol_type = other DNA
taggttcgcgtgcggttttctgggtgttttttgtggactttaaccgttacgtcattttttagtcctatatatactcgctctgtacttggccctttttacactgtgactgattgagctggtgccgtgtcgagtggtgttttttaataggtttttttactggtaaggctgactgtt

SEQ ID NO: 950 - DNA, 174 bp, synthetic construct
  misc_feature 1..174: note = Description of Artificial Sequence: Synthetic polynucleotide
  source 1..174: mol_type = other DNA
tcagcttacgatctcttgtcagatctcattaaatctaaactttttaaacaagattccctgttatccatgcttgtgagtgtggtttaatcataatcttgtattttactttccacacttttcatctctctgccagtgacgtgttggttgtcctcagcgtccctcccataggtcgca

SEQ ID NO: 951 - DNA, 174 bp, synthetic construct
  misc_feature 1..174: note = Description of Artificial Sequence: Synthetic polynucleotide
  source 1..174: mol_type = other DNA
aggctttaaatccattagattggacacaatatttcatttttataggtgttggagccctgcttttagtcattgtacttatgattttccccattgttttccagtgccttgcgaagagccttgaccaagtgcagtcagatcttaacgtgcttcttttaaaaaagaaaaaagggggaa

SEQ ID NO: 952 - DNA, 174 bp, synthetic construct
  misc_feature 1..174: note = Description of Artificial Sequence: Synthetic polynucleotide
  source 1..174: mol_type = other DNA
cttggtttctggagacaggctaaggatgcccttcaggtaccccgaggtaacaagcgacactcgggatctgagaaggggattggggcttctatccaagcgcccaatttaaaaagcttctatgcctgaataggtgaccggaggccggcaccttttcctttacccacaacttacttt

SEQ ID NO: 953 - DNA, 174 bp, synthetic construct
  misc_feature 1..174: note = Description of Artificial Sequence: Synthetic polynucleotide
  source 1..174: mol_type = other DNA
agatcaccaactttcggtgctgttgtttaatcacaatgacaggttttacgagggtcgagctggagaccctgtggcttgtcttgtgatggaaagactgatttttccacctgttcgacaggctactatgatatgacgcttgtttcttttattttgcagactaattcaaaactaaca

SEQ ID NO: 954 - DNA, 204 bp, synthetic construct
  misc_feature 1..204: note = Description of Artificial Sequence: Synthetic polynucleotide
  source 1..204: mol_type = other DNA
aacgtttctcttctggttaccagcaacataggaaattgtcgttgaactacatgttgtaaggctttagagaaataagggagtgtcctatttaggatgaggtgctccggtggcagccccaccaaaacctctagcgactaggaacagctatatcgggttgctatagcagtcaggatgtcattctggcgttccgaaatacccaaacct

SEQ ID NO: 955 - DNA, 174 bp, synthetic construct
  misc_feature 1..174: note = Description of Artificial Sequence: Synthetic polynucleotide
  source 1..174: mol_type = other DNA
aagtagatccaggaacagcagacagaatgatacacctatattattttaactgttttacagatagagccatccaacaggctatcagaggggagaagtatacgtggtgcacattcaaggaaggacataaaggtcaggtacaatcactgcaacttttggcactagttgcatatacaa

SEQ ID NO: 956 - DNA, 628 bp, synthetic construct
  misc_feature 1..628: note = Description of Artificial Sequence: Synthetic polynucleotide
  source 1..628: mol_type = other DNA
cactgggtgcaagccccagaaaccgacgcctatctaagtagacgcaatgactcggcgccaactcggcgaccggccaaaaggtggtggatgggtgatgacagggttggtaggtcgtaaatcccggtcaccttggtagccactataggtgggtcttaagagaaggttaagattcctcttgtgcctgcggcgagaccgcgcacggtccacaggtgttggccctaccggtgtgaataagggcccgacgtcaggctcgtcgttagaccgagcccgtcacccacctgggcaaacgtcgcccacgtacggtccacgtcgcccttcaatgtctctcttgaccaataggcttagccggccgagttgacaaggaccagtgggggtcgggggcttggggagggaccccaagtcctgcccttcccggtgggccgggaaatgcatggggccacccagctccgcggcggcctgcagccggggtagcccaagaatccttcgggtgagggcgggtggcatttctcttttctataccatcatggcagtccttctgctccttctcgtggtcgaggccggggccattctggccccggccacccacgcttgtcgagcgaatgggcaatacttcctcacaaactgttgc

SEQ ID NO: 957 - DNA, 174 bp, synthetic construct
  misc_feature 1..174: note = Description of Artificial Sequence: Synthetic polynucleotide
  source 1..174: mol_type = other DNA
attgtgctaaatgtaactgaggagctgagaagtgaccaccttaccctgtcttgcctgcggactgactatgagtcaagtgatgaagacgacaactgaggtaagtgggtggagctaggtgggattataaaaggctggaagtcaactaaaaattgtttttgttcttttaacagcacg

SEQ ID NO: 958 - DNA, 174 bp, synthetic construct
  misc_feature 1..174: note = Description of Artificial Sequence: Synthetic polynucleotide
  source 1..174: mol_type = other DNA
gaggagctgaggcccgatcacttggtgctggcctgcacccgcgctgagtttggctctagcgatgaagatacagattgaggtactgaaatgtgtgggcgtggcttaagggtgggaaagaatatataaggtgggggtctcatgtagttttgtatctgttttgcagcagccgccgcc

SEQ ID NO: 959 - DNA, 174 bp, synthetic construct
  misc_feature 1..174: note = Description of Artificial Sequence: Synthetic polynucleotide
  source 1..174: mol_type = other DNA
ttggctcattatttctgttgtttttgttgtattgttgagtcttcttgtgttttgttgtctttctacaggttgttgtggttgttgcaattgtttaacttcatcaatgcgaggctgttgtgattgtggttcaactaaacttccttattacgaatttgaaaaggtccacgttcaata

SEQ ID NO: 960 - DNA, 174 bp, synthetic construct
  misc_feature 1..174: note = Description of Artificial Sequence: Synthetic polynucleotide
  source 1..174: mol_type = other DNA
acatagcagaatctgaaaggtcaccattcaagattgattctacgtgtaagcattgtcattgtcgcgttagactgtgttgtgtcgccaccgacgcagctatccgtgtgtttgagtgccttcttcaatcagaattttcttttctgtgtcttaagtgctccaaagaattgctacgaa

SEQ ID NO: 961 - DNA, 174 bp, synthetic construct
  misc_feature 1..174: note = Description of Artificial Sequence: Synthetic polynucleotide
  source 1..174: mol_type = other DNA
acacttatcataagaggtgttagttcctaaggataatcaatacacaatattccacgacaattggcgcccaacgtggggctcgaatataagtcgggatatttataaaaatattaattttaatccctagggaccttcgtgcactgcggaaggtataattctactgccttaatagaa

SEQ ID NO: 962 - DNA, 174 bp, synthetic construct
  misc_feature 1..174: note = Description of Artificial Sequence: Synthetic polynucleotide
  source 1..174: mol_type = other DNA
cgttatccctcccaaatcgcctcctttgttttagcctggacccgggcttttgtctcagaatggtccgagatcttgtacgcagaggacagaggcacaccgttggaacagcgtaccctcaaatcagtttacggagacacagacagcttgtttgtcaccgaagccggataccgcctc

SEQ ID NO: 963 - DNA, 174 bp, synthetic construct
  misc_feature 1..174: note = Description of Artificial Sequence: Synthetic polynucleotide
  source 1..174: mol_type = other DNA
tgcagtctgggcctgacataacttttcctactgcatctatgggaacaccctttagtcctgtaactcctgctttacctacaggccctgtttttattacaggttctgacttctatttgcatcctacatggtactttgcacgcagacgccgtaaacgtattcccttattttttacag

SEQ ID NO: 964 - DNA, 174 bp, synthetic construct
  misc_feature 1..174: note = Description of Artificial Sequence: Synthetic polynucleotide
  source 1..174: mol_type = other DNA
cagaatacaatgctaaacaagctatccatctccagcttatgttaaaatcccttgaaaaatcaaaatttgcaaaagagccatggtcattaactgatgcaagtgcagagcttgtaaatactcctcctagggactgcttcaaaaaaggaggatttacagtaactgtgtactttgata

SEQ ID NO: 965 - DNA, 174 bp, synthetic construct
  misc_feature 1..174: note = Description of Artificial Sequence: Synthetic polynucleotide
  source 1..174: mol_type = other DNA
atatagactgggaaggaaataaacatttctatgtgcggtttgcagatgaggcaacacaatttgatgcagcaaatgaatggcaagtacgaactgaaagtgaaataatatctaattctgttaccagcacccccccacggagcgacccgaggcctactggatcttctgccatcacct

SEQ ID NO: 966 - DNA, 642 bp, synthetic construct
  misc_feature 1..642: note = Description of Artificial Sequence: Synthetic polynucleotide
  source 1..642: mol_type = other DNA
aactctaagccgaacaattatagctaggctttttattatataacattaattaggcattagcgttgtcgccaatctcttggtaatcctaaggatacctttcctgttgactaagatgaagcgccttcggttaccgatgcccggtgtccacgaagccatcgtggtcggccgcgtcccccacctctcccaacttggactccatgttttcagtaggtgtaatgattagtattattgattctgctcgttcaatgtgtttatcttcacgatctgggacccaacacatgcttcactcatgtttaaatgttggttccctcattttgaagacacccaaaccatagagtgcgagaatgaggatttctacttccattctggtaacagaaatgaattcctgcgtgtgtctcgtaaatggaatctttaagaacttcagataaatcgaacaatacactaatacaagttgttttctaccaacatgttcaatgcggctaatctgaccgtggagctgtgaagcgctcaaacccgagtgttgtatacagtcgtaatgcgtaagtccatgaggaaccgactactgttacctctgttggtgtgtttctcctttattctcttttattattatttgttattgcaaatactacaactttgatcaac

SEQ ID NO: 967 - DNA, 174 bp, synthetic construct
  misc_feature 1..174: note = Description of Artificial Sequence: Synthetic polynucleotide
  source 1..174: mol_type = other DNA
atatcatccacatccgttacagtaaacaggaaaaagtgcaagtatctggacataggcaatttgttaagtgtaattgtttcagagattttttcagaaattattttcttgtttgtttcagatcttctggagggtagactttgcattttcgttgaagccttcggatgattaggaaaa

SEQ ID NO: 968 - DNA, 174 bp, synthetic construct
  misc_feature 1..174: note = Description of Artificial Sequence: Synthetic polynucleotide
  source 1..174: mol_type = other DNA
aaaaggtcataccccgtaaacggcgggctccagtcccggcccggcggttggcgtgaacgcaacggcgggagctgggttagcgtttagtttagcattcgctctcgcctttccgcccgccccccgaccgttgcgcctttttttttttcgtccaccaaagtctctgtgggtgcgcgc

SEQ ID NO: 969 - DNA, 174 bp, synthetic construct
  misc_feature 1..174: note = Description of Artificial Sequence: Synthetic polynucleotide
  source 1..174: mol_type = other DNA
tttcgtggaagacgtcgggaatatgtcgattcaacgttgtttgtttctaacagttgtagcatccttagcgcgatcgtagacgtttatgtgagactgccggtaacgctgccgttatcgttttttttattttttttttccttttaattttatctcggattccgcacagaaaaaaaa

SEQ ID NO: 970 - DNA, 174 bp, synthetic construct
  misc_feature 1..174: note = Description of Artificial Sequence: Synthetic polynucleotide
  source 1..174: mol_type = other DNA
ccccagactgtgcagatgtcctaatacatagcacttatttcccttgctttacagcaggtgaagtaagaagagccatcagaggggaaaagttattgtcctgctgcaattatccccgagctcatagagcccaggtaccgtcacttcaatttctggccttagtggtagtgcaacaaa

SEQ ID NO: 971 - DNA, 174 bp, synthetic construct
  misc_feature 1..174: note = Description of Artificial Sequence: Synthetic polynucleotide
  source 1..174: mol_type = other DNA
caaaggtcagggcccaagggggttcgcgttgctaggccaccttctcagtccagcgcgtttacgtaagccagacagcagccaattgtcagttctagggagggggaccactgcccctggtataaagtggtcctgcagctatttctggtcgcatcagagcgccaggagtccacacaa

SEQ ID NO: 972 - DNA, 174 bp, synthetic construct
  misc_feature 1..174: note = Description of Artificial Sequence: Synthetic polynucleotide
  source 1..174: mol_type = other DNA
tgtagtacacagaatcgcaaacagtcagacgtctccgaacatgatcagaactcgccatcagaatcgtcagtggatgaaaacgaacccccttaaacacgttttccaacttaataaatgctacccacataaaatcacgtgctagctctgttttctttgttttgtcttccatagagc

SEQ ID NO: 973 - DNA, 174 bp, synthetic construct
  misc_feature 1..174: note = Description of Artificial Sequence: Synthetic polynucleotide
  source 1..174: mol_type = other DNA
gtatatatgttgtgtttatatatattccattatttgtaattcatacacatgcatcttttttaagtcaacagtaacttttttacttgtgtatactgttgtttgtattggtattggtattggtattggtattggtattggtataataaacttttttactttttttttattattacc

SEQ ID NO: 974 - DNA, 174 bp, synthetic construct
  misc_feature 1..174: note = Description of Artificial Sequence: Synthetic polynucleotide
  source 1..174: mol_type = other DNA
aattgctcccaccctcaattttcgcttgccttcttcccttgttaacctgatagcatagcctctaggtttccttgtaggtctgtttgggtttgttggttcacgtggtgctaacttgaattttttggttttctagttccctcttaattacatttgtgccagatcttgtagagcaag

SEQ ID NO: 975 - DNA, 353 bp, synthetic construct
  misc_feature 1..353: note = Description of Artificial Sequence: Synthetic polynucleotide
  source 1..353: mol_type = other DNA
ttcgataccaagagctggtgtctgagggattacgactcgcgtggtcggacagcacatgttagtcatgtattatggtgtttcccaacacgtatctttgctctagtattgaactttagtgatgagtgtacttggcatgtacacctgattagttagcccttgtggatacgccactgccgctcaggtacagtaggacataccccaaatattgggttccactcgtagagaagaaaattagtggcgaaacgtacggtttatgtcaaaggagaaggtgattttaattgcacctgaagcaaccctaggtcttccctttgatgtgagctaataaggagtaaccgattcttacaatgtgatca

SEQ ID NO: 976 - DNA, 175 bp, synthetic construct
  misc_feature 1..175: note = Description of Artificial Sequence: Synthetic polynucleotide
  source 1..175: mol_type = other DNA
agtgttgtgtgatcttgcgcgataaatgctgacgtgaaaacgttgcgtattgctacaacacttggttagctatttagctttactaatcaagacgccgtcgtgcagcccacaaaagtctagatacgtcacaggagagcatacgctaggtcgcgttgactatccttatatatgacct

SEQ ID NO: 977 - DNA, 174 bp, synthetic construct
  misc_feature 1..174: note = Description of Artificial Sequence: Synthetic polynucleotide
  source 1..174: mol_type = other DNA
caccaccagatcatacattcaaaaagggagggcaaacaattgaggtaatctatgatgaggatcccaataatagcaccagacatactgtatggcgccatatatattatcaaaacggtgataacagatggagaaaagcagctagtgatgtagatgttcatggtgtgttttatttag

SEQ ID NO: 978 - DNA, 174 bp, synthetic construct
  misc_feature 1..174: note = Description of Artificial Sequence: Synthetic polynucleotide
  source 1..174: mol_type = other DNA
tgaatgcggattgcagctatgtcaaatcgcaatgcataaaactttcggaatgcgagtgtttatatacttttgcttctgatgtatgtaaggaagattttcataattccgaggaaatgaaggtgtttgttgtccaacattcgcaggaaatcgttggtggaacggatttttctgtac

SEQ ID NO: 979 - DNA, 174 bp, synthetic construct
  misc_feature 1..174: note = Description of Artificial Sequence: Synthetic polynucleotide
  source 1..174: mol_type = other DNA
tgctgctatacattggctgcttatggtgacaattgacaaattgttaccatatagctattggattggccatccggtgacaaacagagctattgtttacttgtttgttggtttcataccattaaattacaaggtcttagaaactctcaactttattttgacactcaatacagcaaa

SEQ ID NO: 980 - DNA, 174 bp, synthetic construct
  misc_feature 1..174: note = Description of Artificial Sequence: Synthetic polynucleotide
  source 1..174: mol_type = other DNA
aagagattatgttagctgtgtactcaaactgtaaaattaagcattatttaagattaatctatatacggcagattaacgagctttcgcatttaatacatactcagaaacaaagtgatttgactttgacacctgatttaggatccacaaacccagaagattttcaatatccgcaag

SEQ ID NO: 981 - DNA, 174 bp, synthetic construct
  misc_feature 1..174: note = Description of Artificial Sequence: Synthetic polynucleotide
  source 1..174: mol_type = other DNA
taaacgctcagtataaaaggccggtggacacgtatgatccttgcctaattctaacgggagaggcagaaagatatatggtggacgctgtgggaaattaccgggaagcctccactggaactaccgtactctaccccacgtatgatctgggctccatagttgcggacatggtgactt

SEQ ID NO: 982 - DNA, 174 bp, synthetic construct
  misc_feature 1..174: note = Description of Artificial Sequence: Synthetic polynucleotide
  source 1..174: mol_type = other DNA
ggctataaaatggcttcgctcatttatagacaattgctcacgaattcttatacagtagatttatccgatgagatacaagagattggatcaactaaatcacaaaatgtcacaattaatcctggaccatttgcgcaaacaggttatgctccagttaactggggacctggagaaatt

SEQ ID NO: 983 - DNA, 174 bp, synthetic construct
  misc_feature 1..174: note = Description of Artificial Sequence: Synthetic polynucleotide
  source 1..174: mol_type = other DNA
tctcagtcgtaagacgctcaactttgtctcgatctagccacgcaaacggaatcggatgtctttgcagatccatattttagaaaacaaactcaaaaacagaactgctcatttccgccaacattcaatgtttaatagtcttttttttacccacacagaaaactgacaagcgacgag

SEQ ID NO: 984 - DNA, 174 bp, synthetic construct
  misc_feature 1..174: note = Description of Artificial Sequence: Synthetic polynucleotide
  source 1..174: mol_type = other DNA
gtattaaaaattgatagcgcttgcgtaagagtaagatctcaagatggatcctgtatctgtagtacatagcttcgctaggagtcaaggcctgccacttaactttgaaactgtgggttgtgagggtccaagtcacgacccacgctttgtaattgaatgtaaatttcttgatttcca

SEQ ID NO: 985 - DNA, 174 bp, synthetic construct
  misc_feature 1..174: note = Description of Artificial Sequence: Synthetic polynucleotide
  source 1..174: mol_type = other DNA
acccgacgaaaaaaacatcccagattcaatgattgcaattgttgcagcggtggcagtggtgatggcactaataataatatgcatgcttttatatgcttgtcgctacaaaaagtttcatcctaaaaaacaagatctcctactaaggcttaacatttaatttctttttatacagcc

SEQ ID NO: 986 - DNA, 174 bp, synthetic construct
  misc_feature 1..174: note = Description of Artificial Sequence: Synthetic polynucleotide
  source 1..174: mol_type = other DNA
cgctgagttactttggaagcgttcagcgcattggtcgttgcgcaacggaggacattaaatcgggttttctgcagtatcgtggaattaccctgccggtgataaagctagagaacatattcgttgacctttctgagaaaaaagtgttcgtatagcttctgagccttctgtctgaag

SEQ ID NO: 987 - DNA, 174 bp, synthetic construct
  misc_feature 1..174: note = Description of Artificial Sequence: Synthetic polynucleotide
  source 1..174: mol_type = other DNA
gaagtgtgtccccctccattccacccactgatatacgcccgacaataaagttgatgatattgaattccacacctactcgtgtttgtgattttatttcatattccatgagagagacctcgcatatttgcagagggtcactgaaacattttatcttaaaacagttacacctgaaaa

SEQ ID NO: 988 - DNA, 174 bp, synthetic construct
  misc_feature 1..174: note = Description of Artificial Sequence: Synthetic polynucleotide
  source 1..174: mol_type = other DNA
tatacgtaaagagaacattgtggcattttccattgcttattgcttggtaacatgcatcatcactgctatcatttgtgtgtgcatacacttgcttatagttattcgccctagacaaagcaatgaggaaaaagagaaaatgccttaacctttttcctcataccttttctttacagc

SEQ ID NO: 989 - DNA, 174 bp, synthetic construct
  misc_feature 1..174: note = Description of Artificial Sequence: Synthetic polynucleotide
  source 1..174: mol_type = other DNA
tggatgtaatggaggatcaatccttaagatatctgcatagtagactagtatgttttaaattccctaacaaattaccactgaatgacgatggctcccttgtatatgaaataacgaatgatacatgggcctgtttttttagaaaatttgctacccagttaaacctggtcttagaag

SEQ ID NO: 990 - DNA, 174 bp, synthetic construct
  misc_feature 1..174: note = Description of Artificial Sequence: Synthetic polynucleotide
  source 1..174: mol_type = other DNA
gaattccttcgcatgaacttaaatccgctccgggagcgccacgagcgcgatgacgtcattagtgagcacatactatcggctctgcgcgatccgaacgtggtcattgtctattaacccgccgtccccttacagttccaccgaacccggcccgggggactcactacccaccgcgag

SEQ ID NO: 991 - DNA, 174 bp, synthetic construct
  misc_feature 1..174: note = Description of Artificial Sequence: Synthetic polynucleotide
  source 1..174: mol_type = other DNA
acttacttgaaatctgaaaccaggtctctgtccatgttttctgtcagcagcacttcgctcccctcttcccagctctggtactgcaggccccggcgggctgcaaacttcctccacactctgaaggggatgtcaaattcctcctgtccctcaatcttcattttttatttctattag

SEQ ID NO: 992 - DNA, 395 bp, synthetic construct
  misc_feature 1..395: note = Description of Artificial Sequence: Synthetic polynucleotide
  source 1..395: mol_type = other DNA
tcccgcatggcaagggcgtgctaccttgccccttgacgcatggtatgcgtcatcatttgccttggttaagccccatagaaacgaggcgtcacgtgccgaaaatccctttgcgtttcacagaaccatcctaaccatgggtgtagtatgggaatcgtgtatggggatgattaggatctctcgtagagggataggtgtgccattcaaatccagggagtactctggctctgacattgggacatttgatgtaaccggacctggttcagtatccgggttgtcctgtattgttacggtgtatccgtcttggcacactgaaagggtatttttgggtaatcctttcctactgcctgatagggtggcgtgcccggccacgagagattaagggtagcaatttaaac

SEQ ID NO: 993 - DNA, 174 bp, synthetic construct
  misc_feature 1..174: note = Description of Artificial Sequence: Synthetic polynucleotide
  source 1..174: mol_type = other DNA
ggcctggtgtgggacgacgaggactcggccgacgatagcagcgtgttggacttgggcgggagcggtggggtcaacccgttcgcgcatctgcagcccaaactggggcgacggatgttttgaaatgcaaaataaaactcaccaaggccatagcgtgcgttctcttccttgttagag

SEQ ID NO: 994 - DNA, 174 bp, synthetic construct
  misc_feature 1..174: note = Description of Artificial Sequence: Synthetic polynucleotide
  source 1..174: mol_type = other DNA
gtcctacattccagttaatctatgggggcgtgatatattaagcaaaatgggtgtttatttatatagtccttcacccactgtgacagatttgatgttagaccaaggcttacttccaaatcaaggtttaggtaaacaacatcaaggcatcattttaccccttgatttaaaatctaa

SEQ ID NO: 995 - DNA, 174 bp, synthetic construct
  misc_feature 1..174: note = Description of Artificial Sequence: Synthetic polynucleotide
  source 1..174: mol_type = other DNA
cattatttaatgtaaatgatacttatgatttcatctattttctagttttgggttttctgccaataccggccgttatataaggcgggatgttgtgttgattacgtcaatacggatggggttttggatataaagacttacagagcttttaaagaatcattacttcgtttattcagg

SEQ ID NO: 996 - DNA, 174 bp, synthetic construct
  misc_feature 1..174: note = Description of Artificial Sequence: Synthetic polynucleotide
  source 1..174: mol_type = other DNA
ttcaagtaactctacaagcttgtctaatttttctggaattggggtcggggttatccttactcttgtaattctgtttattcttatactagcacttctgtgccttagggttgccgcctgctgcacgcacgtttgtacctattgtcagctttttaaacgctgggggcaacatccaag

SEQ ID NO: 997 - DNA, 174 bp, synthetic construct
  misc_feature 1..174: note = Description of Artificial Sequence: Synthetic polynucleotide
  source 1..174: mol_type = other DNA
aagtgctaatacacctggtggtttttcttgaagaccattggaagaagtaaaagggggtgtaacaaagggtacgtctgatgtgtcaaatgggtcaaaagggtaaacggggttgaagtcatcattttcttctgtttcttcagcatactgggttctgctgcgcttcatctagaaaag

SEQ ID NO: 998 - DNA, 174 bp, synthetic construct
  misc_feature 1..174: note = Description of Artificial Sequence: Synthetic polynucleotide
  source 1..174: mol_type = other DNA
tgcgtgtctccccgcacttgtggttaaaaccatgaaagttcatcccaaacaatcttttcctcttctttttcttttagtggtgacaacctactggattggtgattaccaatctgtactagtgttgtattaagacttgttgtgtggagaaaatggactctttcaagaagatttttg

SEQ ID NO: 999 - DNA, 174 bp, synthetic construct
  misc_feature 1..174: note = Description of Artificial Sequence: Synthetic polynucleotide
  source 1..174: mol_type = other DNA
tgggggatttgggagaaaatagtctattgcgtattttctgttcaataattggactgcgttatttaaaggtctgattggttgattgggttataaaaggaattactcctttaaattttacttaatgtacccacaatatcaagtggtcgtttgtatttaacgattattaccggtacc

SEQ ID NO: 1000 - DNA, 174 bp, synthetic construct
  misc_feature 1..174: note = Description of Artificial Sequence: Synthetic polynucleotide
  source 1..174: mol_type = other DNA
gactcgtatgtcctccagtcggacaagacgtggtcgtagctacagttggccaatgcattcttgtacaggtggataaatagctgtctgaaaaaaacacccgggtttcgcaggctgcagtgtagagtctgacctctgacataagaatacttgccttgcaggatctcaaagagggag

SEQ ID NO: 1001 - DNA, 174 bp, synthetic construct
  misc_feature 1..174: note = Description of Artificial Sequence: Synthetic polynucleotide
  source 1..174: mol_type = other DNA
tatatagtgggtcagacatttacacgcccacatcttccccgacatggccatcattgccccccccacccaccactaacttacctgcaatagttgtgcatggggataattattatttatggccctatatttatttaatccataaacgccgtaaacgtatgccttattttttttcag

SEQ ID NO: 1002 - DNA, 174 bp, synthetic construct
  misc_feature 1..174: note = Description of Artificial Sequence: Synthetic polynucleotide
  source 1..174: mol_type = other DNA
acctataaaacaggacatacaacgttacagaatagtgtgtggttgtacacagtgtggacggtcagttaaacttgttgtcagtagtacaggcgcggacatacaacagctgcatcagatgcttctggacacactgggcattgtgtgtccattgtgtgcctgcgtggagtgactgca

SEQ ID NO: 1003 - DNA, 174 bp, synthetic construct
  misc_feature 1..174: note = Description of Artificial Sequence: Synthetic polynucleotide
  source 1..174: mol_type = other DNA
aacttgtcttatgctggatgtacgcgtagagccactgcttgaagccacagttgatcaccttgaaaatagagtgggttttgacctggctgtatgttttcaccaacacagcggcggtgaacgctgtcacctgcgtgacttgcactttatcgtccttcgagaccgtttggaataaaa

SEQ ID NO: 1004 - DNA, 174 bp, synthetic construct
  misc_feature 1..174: note = Description of Artificial Sequence: Synthetic polynucleotide
  source 1..174: mol_type = other DNA
aattacttaccggaaatctgaaaatacatcatggtctccgtgtactcttataaaatttccctcttcccaactgtcaaacctgacagacttgcaaacagcaaactttctccaaatcttaaatggaaggtcagattcttcttcccaatccctacccaccatcttcatcttttctag

SEQ ID NO: 1005 - DNA, 174 bp, synthetic construct
  misc_feature 1..174: note = Description of Artificial Sequence: Synthetic polynucleotide
  source 1..174: mol_type = other DNA
ctggttgtctgtgggatctttattcttgtggttcttctgtactttgtctgctgcaaagccagagagaaatctaggaggcccatctacaggccagtgattggggaacctcagccactccaagtggatggaggcttaaggaatcttctcttctcttttacagtatggtgatcagcc

SEQ ID NO: 1006 - DNA, 174 bp, synthetic construct
  misc_feature 1..174: note = Description of Artificial Sequence: Synthetic polynucleotide
  source 1..174: mol_type = other DNA
cgcacatgtgatcctaggcgattcttgatcgcgcttattagctaaccaatttaatttggtgttgaagtgttgacacgctctctaacacatggggcagcttatcagcttctttcaggagattcctgtttttctacaggaagctctgaacatcgctttagtggctgttagtctcat

SEQ ID NO: 1007 - DNA, 174 bp, synthetic construct
  misc_feature 1..174: note = Description of Artificial Sequence: Synthetic polynucleotide
  source 1..174: mol_type = other DNA
ggtttaagcagagtctgagccgttcagaggctcatttgataaatagaagatttatttgggcttggtggtaagtgtgattttatgttttctttgattttcttgtagacttgttcctgacgctgctacaggagcagaagactaacaagcttcatttatttttccaggtaagcaaac

SEQ ID NO: 1008 - DNA, 174 bp, synthetic construct
  misc_feature 1..174: note = Description of Artificial Sequence: Synthetic polynucleotide
  source 1..174: mol_type = other DNA
gtataaattttgtatccgatagtagcacatagaatcacaatcacatccccgttttttgaaattttataatttctacagcaaattttatatcaaatgcctaggaaaaaggagcaggccagcaagagtgaaaatgaaaagcaaacaagtaacgttcaagctcaagatttcaaaact

SEQ ID NO: 1009 - DNA, 174 bp, synthetic construct
  misc_feature 1..174: note = Description of Artificial Sequence: Synthetic polynucleotide
  source 1..174: mol_type = other DNA
ttatgtgagcctgtgtgagctgacaaacttagtagtgtttgtgaggattaacaacaattaacacagtgcgagctgtttcttagcacgaagatctcgatgtctaagaaaccaggagggcccggcaagagccgggctgtcaatatgctaaaacgcggaatgccccgcgtgttgtcc

SEQ ID NO: 1010 - DNA, 174 bp, synthetic construct
  misc_feature 1..174: note = Description of Artificial Sequence: Synthetic polynucleotide
  source 1..174: mol_type = other DNA
gaagacaggaacttactgtgctgctttttaatcacagggaccgatttttgtatgtccgcaagggccacccagtgggtaccctgttgctggagagagtgatttttccttcagtaaaaatagccaccttagtttagtgcatgctttctgtttttcagactctcatctctactaacc

SEQ ID NO: 1011 - DNA, 445 bp, synthetic construct
  misc_feature 1..445: note = Description of Artificial Sequence: Synthetic polynucleotide
  source 1..445: mol_type = other DNA
accacaaacactccagtttgttacactccgctaggaatgctcctggagcaccccccctagcagggcgtgggggatttcccctgcccgtctgcagaagggtggagccaaccaccttagtatgtaggcggcgggactcatgacgctcgcgtgatgacaagcgccaagcttgacttggatggccctgatgggcgttcatgggttcggtggtggtggcgctttaggcagcctccacgcccaccacctcccagatagagcggcggcactgtagggaagaccggggaccggtcactaccaaggacgcagacctctttttgagtatcacgcctccggaagtagttgggcaagcccacctatatgtgttgggatggttggggttagccatccataccgtactgcctgatagggtccttgcgaggggatctgggagtctcgtagaccgtagcac

SEQ ID NO: 1012 - DNA, 174 bp, synthetic construct
  misc_feature 1..174: note = Description of Artificial Sequence: Synthetic polynucleotide
  source 1..174: mol_type = other DNA
cttaagcgcctctgtagggaagccaggaatgtccaggaggtaccccttccgctcggaagggatctgacctggagacacatcacatgtgctttacacctgtgcttgtgtttaaaaattgtcgcagcttccccaaaccaagtggtcttggttttctctttttattatattgtcaat

SEQ ID NO: 1013 - DNA, 174 bp, synthetic construct
  misc_feature 1..174: note = Description of Artificial Sequence: Synthetic polynucleotide
  source 1..174: mol_type = other DNA
ttcagcaagtaactgagaggtgggaagctcaaagccaaagtcctaatgtgcagtcaggtgaatttattgaaaaatttgaggctcctggtggtgcaaatcaaagaactgctcctcagtggatgttgcctttacttctaggcctgtacggaagtgttacttctgctctaaaagctt

SEQ ID NO: 1014 - DNA, 174 bp, synthetic construct
  misc_feature 1..174: note = Description of Artificial Sequence: Synthetic polynucleotide
  source 1..174: mol_type = other DNA
ttttctataatacacgtggtttatttttataaaaaaaaaaggtcgtattcgtcatttgtgtggggaacgggtgtacaaaacggacgggaaaggctaactcgcgtttatatacttatatccgccaggaacgataaccgtgtccgctcaactttctaattgacatacggtaatacc

SEQ ID NO: 1015 - DNA, 174 bp, synthetic construct
  misc_feature 1..174: note = Description of Artificial Sequence: Synthetic polynucleotide
  source 1..174: mol_type = other DNA
tgtggctcctccagtggaccctgcaggaaccctggattattctgaattatcacgtgaatctgacgtaatatgtacagttaaataagtgcaacttttgcttatattttacatacaaacttgtgtgtaccatagatgaacacatttttatttgttttgaattattaaacttaagac

SEQ ID NO: 1016 - DNA, 174 bp, synthetic construct
  misc_feature 1..174: note = Description of Artificial Sequence: Synthetic polynucleotide
  source 1..174: mol_type = other DNA
agaattcgtcttgctctattcacccttacttttcttcttgcccgttctctttcttagtatgaatccagtatgcctgcctgtaattgttgcgccctacctcttttggctggcggctattgccgcctcgtgtttcacggcctcagttagtaccgttgtgaccgccaccggcttggc

SEQ ID NO: 1017 - DNA, 334 bp, synthetic construct
  misc_feature 1..334: note = Description of Artificial Sequence: Synthetic polynucleotide
  source 1..334: mol_type = other DNA
ttcagggcctccctccagcgacggccgaactgggctagccatgcccacagtaggactagcaaacggagggactagccgtagtggcgagctccctgggtggtctaagtcctgagtacaggacagtcgtcagtagttcgacgtgagcagaagcccacctcgagatgctatgtggacgagggcatgcccaagacacaccttaaccctagcgggggtcgctagggtgaaatcacaccacgtgatgggagtacgacctgatagggcgctgcagaggcccactattaggctagtataaaaatctctgctgtacatggcacatggagttgaatcattttga

SEQ ID NO: 1018 - DNA, 174 bp, synthetic construct
  misc_feature 1..174: note = Description of Artificial Sequence: Synthetic polynucleotide
  source 1..174: mol_type = other DNA
gtaatcaaggtagattttgtgctacattcactctttatggtaaatccaaacattatgataaatattttggagtaataaatggtttcacagcattcgctaatactgtagaggatgctgttaacaaactggttttcttagctgttgactttattacctggcgcagacaggagttaa

SEQ ID NO: 1019 - DNA, 211 bp, synthetic construct
  misc_feature 1..211: note = Description of Artificial Sequence: Synthetic polynucleotide
  source 1..211: mol_type = other DNA
taaaaagcaaaaatgtgatcttgcttgtaaatacaattttgagaggttaataaattacaagtagtgctatttttgtatttaggttagctatttagctttacgttccaggatgcctagtggcagccccacaatatccaggaagccctctctgcggtttttcagattaggtagtcgaaaaacctaagaaatttacctgctacatttcaagata

SEQ ID NO: 1020 - DNA, 174 bp, synthetic construct
  misc_feature 1..174: note = Description of Artificial Sequence: Synthetic polynucleotide
  source 1..174: mol_type = other DNA
acataacttcaagttcaacctcttccatgtcactgagacccagttcaaacccagagacactcagcccctccaccagtgacaattcaacgtcacatatgcctttactaacctccgctcacccaacaggtggtgaaaatataacacaggtgacaccagcctctatcagcacacatc

SEQ ID NO: 1021 - DNA, 174 bp, synthetic construct
  misc_feature 1..174: note = Description of Artificial Sequence: Synthetic polynucleotide
  source 1..174: mol_type = other DNA
ctatttcgttcttggatcaatatttaattgcagacgaggttttgtggaacgttgttcccgtaatttgttttttcaggcagtggggactcaagttagatttttttaaaaagttttcggggaagaccaagcggttgtcattttcgtttatatgtgatttgttcgctaggtctcagg

SEQ ID NO: 1022 - DNA, 174 bp, synthetic construct
  misc_feature 1..174: note = Description of Artificial Sequence: Synthetic polynucleotide
  source 1..174: mol_type = other DNA
cccgttacctttttaatatctatatagtttggtcccccctctatcccgcccaccgctgggcgctataaagccgccaccctctcttccctcaggtcatccttggtcgatcccgaacgacacacggcgtggagcaaaacgcctccccctgagccgctttcctaccaacacaacggc

SEQ ID NO: 1023 - DNA, 174 bp, synthetic construct
  misc_feature 1..174: note = Description of Artificial Sequence: Synthetic polynucleotide
  source 1..174: mol_type = other DNA
aagcacagtggatttattataaagatcaaaaagataagaaatggaaaggaccaatgagagtagaatactggggacagggatcagtattattaaaggatgaagagaagggatattttcttatacctaggagacacataaggagagttccagaaccctgcgctcttcctgaagggg

SEQ ID NO: 1024 - DNA, 174 bp, synthetic construct
  misc_feature 1..174: note = Description of Artificial Sequence: Synthetic polynucleotide
  source 1..174: mol_type = other DNA
tatacccacgttttagtgggtgggacttaaaagaaatgggtggagggatataggggtgtgtcttcgttggtaccaattataaaaatgtactcgccacaactcacaatttagaacgcatggcagttctgctacgtgtttggatgcccggacattagaatacagccagttgttacc

SEQ ID NO: 1025 - DNA, 174 bp, synthetic construct
  misc_feature 1..174: note = Description of Artificial Sequence: Synthetic polynucleotide
  source 1..174: mol_type = other DNA
catgcgcaggcgcctgagtggcggctttctgcccgcgctcatccccataatcgccgcggccatcggcacgatcccgggcatagcttccgttgcgctgcaggcgtcgcagcgccgttgatgtgcgaataaaagcctctttagactctgacacacctggtcctgtatatttttaga

SEQ ID NO: 1026 - DNA, 174 bp, synthetic construct
  misc_feature 1..174: note = Description of Artificial Sequence: Synthetic polynucleotide
  source 1..174: mol_type = other DNA
ctttgcggtgtacctgattttcacatttgtgactgctacctgcgtctgcagtattattactctgctaatcacctcgctccaattttttgattactactacgtgagaattgtttaccgcagacaccacccccgttaccaaaaccctcaaattgcggctcttttgcagctccaacc

SEQ ID NO: 1027 - DNA, 174 bp, synthetic construct
  misc_feature 1..174: note = Description of Artificial Sequence: Synthetic polynucleotide
  source 1..174: mol_type = other DNA
caacacaattttcacatctagagtatcttttcaaaggaaaaatttcttcggggtatgtatggcaatgcattggaaaaatgctgcaatgttcatcaatagttaattgtgttttttttgttttatagaagtaccgtggactttcttgaagaaattgtgaagtctttataaaggacc

SEQ ID NO: 1028 - DNA, 174 bp, synthetic construct
  misc_feature 1..174: note = Description of Artificial Sequence: Synthetic polynucleotide
  source 1..174: mol_type = other DNA
ccttgccgtcctcggggggcgttacatagcccggatcttgctccacttgctcattttcctcctcatgtttcactagctcgacggcgccgacctcagagttgggggtggttaaggtttcggagtctggctgcagcttaagatcctcctccatattttctcgcctaggagtaaagc

SEQ ID NO: 1029 - DNA, 174 bp, synthetic construct
  misc_feature 1..174: note = Description of Artificial Sequence: Synthetic polynucleotide
  source 1..174: mol_type = other DNA
aactaaagacgtttggcctacaatctccaacttcgtttctggaataggtaatttcataaaggacactgctggaggtatttttggaactgcctttagttttctgggatatgtaaaacctgtacttttgggatttgtgataatattttgcataattttaattataaaaatcatagg

SEQ ID NO: 1030 - DNA, 174 bp, synthetic construct
  misc_feature 1..174: note = Description of Artificial Sequence: Synthetic polynucleotide
  source 1..174: mol_type = other DNA
gcaattccacccaatgaaaaaaacattccaaattcaatgattgcaattattgcggcggtggcattgggaatggcactaataataatatgcatgctcctatatgcttgttactataaaaagtttcaacataaacaggatccactactaaattttaacatttaattttttatacag

SEQ ID NO: 1031 - DNA, 174 bp, synthetic construct
  misc_feature 1..174: note = Description of Artificial Sequence: Synthetic polynucleotide
  source 1..174: mol_type = other DNA
aaattaaaacggttttcaccatgattaaccaaatcaattcccttacacaagaaaaaacgtttttcattgtggctgatgtttctgctgacaataggctggcaacttgtatatttaaagagtgaataaaaagttctttgaaatagtgtctgttgtaacagattttatttcagctcc

SEQ ID NO: 1032 - DNA, 174 bp, synthetic construct
  misc_feature 1..174: note = Description of Artificial Sequence: Synthetic polynucleotide
  source 1..174: mol_type = other DNA
tgtacttttccctggtgacgcagtttcggggtgtgtgttgggtttggcgggattttttacactttactcccattacgtcagtttagggcttgtgtatatatatattgtggagaggttggagagtcactttagagcttgtgctttgtgtgcccgctgtactttgtctggtaagcc

SEQ ID NO: 1033 - DNA, 174 bp, synthetic construct
  misc_feature 1..174: note = Description of Artificial Sequence: Synthetic polynucleotide
  source 1..174: mol_type = other DNA
gaatttcgaagtcgaccccatggatgagtccacccttctctatgttgtcttcgaagtcttcgacgtcgtccgagtgcaccagccccaccgcggcgtcattgaggccgtctacctgcgcacccccttctcagccggtaacgccaccacataaattcttgcttcttgcaagaagcc

SEQ ID NO: 1034 - DNA, 174 bp, synthetic construct
  misc_feature 1..174: note = Description of Artificial Sequence: Synthetic polynucleotide
  source 1..174: mol_type = other DNA
gtgggtgtggttgtgcatttcagtcgtgctcatctttgtggtgagtatgttgctattatgttgttgttctactggttgctgtggcttctttagttgttttgcatcttctattagaggttgttgtgaatcaactaaacttccttattacgacgttgaaaagatccacatacagta

SEQ ID NO: 1035 - DNA, 174 bp, synthetic construct
  misc_feature 1..174: note = Description of Artificial Sequence: Synthetic polynucleotide
  source 1..174: mol_type = other DNA
aattccctcagctactgtggcaatcgtggtgggagtgattgcgggctttgtaactctgatcattgtcttcatatgctacatctgctgccgcaagcgtcccaggtcatacaatcatatggtagacccactactcagcttctcttactgaaactcagtcactctcatttcagaacc

SEQ ID NO: 1036 - DNA, 174 bp, synthetic construct
  misc_feature 1..174: note = Description of Artificial Sequence: Synthetic polynucleotide
  source 1..174: mol_type = other DNA
ttgtagatctctcacgcattttagtgtcatgaattagtgtttcaaatcagttgcatatcaattaagaaaaacttaggagacaggtatagaacctctctttcagataactggtcaattaaggacagaaattctgtttctcaaatccgctagcctttgtcaaagaggacacaagca

SEQ ID NO: 1037 - DNA, 233 bp, synthetic construct
  misc_feature 1..233: note = Description of Artificial Sequence: Synthetic polynucleotide
  source 1..233: mol_type = other DNA
tgtgtgcccgtctgttgtgtgactctggtaactagagatccctcagacccttttagtcagtgtggaaaatctctagcagtggcgcccgaacagggacctgaaagcgaaagggaaaccagaggagctctctcgacgcaggactcggcttgctgaagcgcgcacggcaagaggcgaggggcggcgactggtgagtacgccaaaaattttgactagcggaggctagaaggagagag

SEQ ID NO: 1038 - DNA, 174 bp, synthetic construct
  misc_feature 1..174: note = Description of Artificial Sequence: Synthetic polynucleotide
  source 1..174: mol_type = other DNA
accgttgatcgggaaatgttcggatggtgtggttatgcacgtaaagaacattttgtagtgatgtaataaaatgttggcgccaaaaaaatacagtatataatgtgttggtcatttcatttgttttttaaagcacataaggcgcgagttggtgctaggacttcgttcttgacagag

SEQ ID NO: 1039 - DNA, 174 bp, synthetic construct
  misc_feature 1..174: note = Description of Artificial Sequence: Synthetic polynucleotide
  source 1..174: mol_type = other DNA
ctaataaattaagaaaaacttaggacccaagtcctttaaacgtgcatgattgagatagtcagaaattggagctaatttgaatactagtgagtaaattaggagtagtagtattgaaccacctcatatcttatttcttctgaactgcattaaaatttgtacccaggatataacaac

SEQ ID NO: 1040 - DNA, 174 bp, synthetic construct
  misc_feature 1..174: note = Description of Artificial Sequence: Synthetic polynucleotide
  source 1..174: mol_type = other DNA
gcgcggactaaaaacagggatgtactactgcaaggttcgcaaggcgaccaacagcggggtctttggcggcgacgacaacattgtctgcatgagctgcgcgctgtgaccgacaaaccccctccgcgccaggcccgccgccactgtcgtcgccgtcccacgctctcccctgctgcc

SEQ ID NO: 1041 - DNA, 174 bp, synthetic construct
  misc_feature 1..174: note = Description of Artificial Sequence: Synthetic polynucleotide
  source 1..174: mol_type = other DNA
aaaacagtgggtagaaaagatatttttacaggcgatttgttgaaccttttttattgttcagcttgctttgtaatttttttctaaagaaaatttgcagcttctaaatgtgctaaataaaaaaaaattgaaatatttatgcctttgttttttcttgggtaattttaaaactgaagc

SEQ ID NO: 1042 - DNA, 174 bp, synthetic construct
  misc_feature 1..174: note = Description of Artificial Sequence: Synthetic polynucleotide
  source 1..174: mol_type = other DNA
gctctgacattgggacatttgatgtaaccggacctggttcagtatccgggttgtcctgtattgttacggtgtatccgtcttggcacactgaaagggtatttttgggtaatcctttcctactgcctgatagggtggcgtgcccggccacgagagattaagggtagcaatttaaac

SEQ ID NO: 1043 - DNA, 174 bp, synthetic construct
  misc_feature 1..174: note = Description of Artificial Sequence: Synthetic polynucleotide
  source 1..174: mol_type = other DNA
aaactaattatagatatttacacactacaataaaaggatttgaatttccaaatccttttcctatgaaagcagataatacacctcagttcgaactaactgaccaaagctggaaatctttttttacaaggctttggacacaattagacctgagtgatcaagaagaggagggcgagg

SEQ ID NO: 1044 - DNA, 174 bp, synthetic construct
  misc_feature 1..174: note = Description of Artificial Sequence: Synthetic polynucleotide
  source 1..174: mol_type = other DNA
atctggagaacatgctagacaattgggagatttcgcgcaccaatcttaagacttgtaaagaactacgtaaagccctcaccgaggcctcgagagcaaggcggaaacaaacaatttataaactgcaaggctcggatataagcctttccgttagtgaagttggagtttttgggcaac

SEQ ID NO: 1045 - DNA, 174 bp, synthetic construct
  misc_feature 1..174: note = Description of Artificial Sequence: Synthetic polynucleotide
  source 1..174: mol_type = other DNA
aacctctactggtggtaaacgtcctaccacttttcctatacctcaacctgttcccatgcagccatatgtaccttttgtaattgtggattcatttatttcttctgatacattttatttgcatccttccttggtacgtaaacgcaaacgacgggaccttgtttaattgtttttcag

SEQ ID NO: 1046 - DNA, 174 bp, synthetic construct
  misc_feature 1..174: note = Description of Artificial Sequence: Synthetic polynucleotide
  source 1..174: mol_type = other DNA
gatgtccacgtttcgaaagacgaaaaattcaatgtatcttgagctcgtttgtctctgtagggtaatcgtttcagagatcttttctgaaattacgctgtacatttttccaggtgacagagggctgtctgctgttaatcacgtcgacgcgaagactagttcaaaataacacttaag

SEQ ID NO: 1047 - DNA, 174 bp, synthetic construct
  misc_feature 1..174: note = Description of Artificial Sequence: Synthetic polynucleotide
  source 1..174: mol_type = other DNA
gtttcctatccagaatctagagtaatacctgctggaggtttaccaactgagccatttgttcctctagaaccagctttgttatctgatatatttagtacggattttgtatatcgtcctagtttatatcgcaagaaacggaaacgattagaaatgttttaattgttttgcaggaac

SEQ ID NO: 1048 - DNA, 174 bp, synthetic construct
  misc_feature 1..174: note = Description of Artificial Sequence: Synthetic polynucleotide
  source 1..174: mol_type = other DNA
aggacagatggaaatatttgcgcagcaggctgacagtgtttacatttaagaatccatttccttttgcaagtccgggagagcccctgtacccgataaataatgcaaactggaaatgctttttccaaaggtcgtggtcccgcttagacctaaacagtccagaggagcaggacgaca

SEQ ID NO: 1049 - DNA, 174 bp, synthetic construct
  misc_feature 1..174: note = Description of Artificial Sequence: Synthetic polynucleotide
  source 1..174: mol_type = other DNA
atatgttttcaaaaaatcgagataaaaaacactttgcttcatccgaaatccaagcaaagggtaaatgtgacattttcatgactcgttttttctgttgagcattattgaacacttcttaaaaaattagtttaatagtctctattttctctttgattagatacatgcgctgccgac

SEQ ID NO: 1050 - DNA, 77 bp, synthetic construct
  misc_feature 1..77: note = Description of Artificial Sequence: Synthetic oligonucleotide
  source 1..77: mol_type = other DNA
cagagagagtaacgcacaatcactactcaaacgacaacagcaaagcgcaatacatacggatctcaactgggcaataa

SEQ ID NO: 1051 - DNA, 191 bp, synthetic construct
  misc_feature 1..191: note = Description of Artificial Sequence: Synthetic polynucleotide
  source 1..191: mol_type = other DNA
gactatgtgatcttattaaaattaggttaaatttcgaggttaaaaatagttttaatattgctatagtcttagaggtcttgtatatttatacttaccacacaagatggaccggagcagccctccaatatctagtgtaccctcgtgctcgctcaaacattaagtggtgttgtgcgaaaagaatctcacttcaa

SEQ ID NO: 1052 - DNA, 174 bp, synthetic construct
  misc_feature 1..174: note = Description of Artificial Sequence: Synthetic polynucleotide
  source 1..174: mol_type = other DNA
tgtgggttcttttgtcatggttcctggcggggaagtggccgcgctggtccgtgcagacctgcacgattatgttcagctggccctgcgaagggacctacgggatcgcggtatttttgttaatgttccgcttttgaatcttatacaggtctgtgaggaacctgaatttttgcaatc

SEQ ID NO: 1053 - DNA, 174 bp, synthetic construct
  misc_feature 1..174: note = Description of Artificial Sequence: Synthetic polynucleotide
  source 1..174: mol_type = other DNA
ttgtatcgaatagtaaacttaccagacgtcagccaatcagagagggtctcgcgtctctacagtcgtccgagtatggagaaaaacttttacatgaccttagagagttgttcttgatcaattctactgcggatctggataaagatacatcatctctctttcatatgtgatatagta

SEQ ID NO: 1054 - DNA, 174 bp, synthetic construct
  misc_feature 1..174: note = Description of Artificial Sequence: Synthetic polynucleotide
  source 1..174: mol_type = other DNA
gcgtaagtctgggacggaaccgactactttgggtgtccgtgtttcctgttttacttactttggctgcttatggtgacaatctagtgttgttaccatatagctattggattggccatccggtgttttgaattgtgtgtttatactaattcttttacatatcacagacaaccaaat

SEQ ID NO: 1055 - DNA, 174 bp, synthetic construct
  misc_feature 1..174: note = Description of Artificial Sequence: Synthetic polynucleotide
  source 1..174: mol_type = other DNA
cgcccacggtctggccgtcatcgtcgcgggtaaccaaacctggtacgtgaatccgtttagcctggctcacctgctggatgcaatatataacgttttagggatcgaagacctgagtgccaacttttggcgccaactggctccttaccgtcacactctcatcgtgccgcagacttg

SEQ ID NO: 1056 - DNA, 174 bp, synthetic construct
  misc_feature 1..174: note = Description of Artificial Sequence: Synthetic polynucleotide
  source 1..174: mol_type = other DNA
gcattacgaacaaagggtgcaggtaagcttgtttggggaaagtgaaaactcccagaagcattaatcatgtgactaaacacgcccattgcggggttgggtgagcctataaattctacaacattggcggaagatacaggcaactgcaaacacgcaattgtcagatattttgcagcc

SEQ ID NO: 1057 - DNA, 174 bp, synthetic construct
  misc_feature 1..174: note = Description of Artificial Sequence: Synthetic polynucleotide
  source 1..174: mol_type = other DNA
agagtccgtgcgtggatgtcacggcggagcatatgagtcaattcttgcagtggtgccggagccttaaaaagaggttcaaggagagctacttcttcaactgtcgcccacggtttgagcaccctcatcttccaggtctggtagctgaactcttggcagacgacttctttggtccag

SEQ ID NO: 1058 - DNA, 174 bp, synthetic construct
  misc_feature 1..174: note = Description of Artificial Sequence: Synthetic polynucleotide
  source 1..174: mol_type = other DNA
cgaggtatcatttcgaaagacgaaaaattcaatgtatctcgagctcgtttgtctctgtagggtaatcgtttcggagatcttttctgaaattgcgctgtacatttttccaggtgacagagagctgtctgctgttaatcacgtcgacgcgaagactagttgaaaataacgcttaag

SEQ ID NO: 1059 - DNA, 174 bp, synthetic construct
  misc_feature 1..174: note = Description of Artificial Sequence: Synthetic polynucleotide
  source 1..174: mol_type = other DNA
aagtgctcttcctcacctgcccctgagtcactaccggttggggtaagaactgagggggcaaagtcatcaatctcagcgtaaaagttttcgtgtctttcgttttcaggggactcatcctcctgacattttcgccagccgccgggcgggccggcctcctttcctggaaatccagcc

SEQ ID NO: 1060 - DNA, 174 bp, synthetic construct
  misc_feature 1..174: note = Description of Artificial Sequence: Synthetic polynucleotide
  source 1..174: mol_type = other DNA
tggccctaccgctacccctctttcaacccctcaccatcacccaacccgctgccccacccacatcccccccaccgccaccgctaccgtcacctctgaacttcacctttttcctccatctcgccccacttctctctacatttctccgcccctctattcttactcctgttttctagg

SEQ ID NO: 1061 - DNA, 174 bp, synthetic construct
  misc_feature 1..174: note = Description of Artificial Sequence: Synthetic polynucleotide
  source 1..174: mol_type = other DNA
ccgagaatgtaacgggggtgtaaatagccagggggtttgttttaatttattaataaaaatgtgtattacgttactcatgtgtctccattacgcatcacagggggtatttatacccgataatatacaaaacgcgttttgtacctctaccgcacccgatatcttaacggggttatt

SEQ ID NO: 1062 - DNA, 174 bp, synthetic construct
  misc_feature 1..174: note = Description of Artificial Sequence: Synthetic polynucleotide
  source 1..174: mol_type = other DNA
ctcccaaaggagggatatgtggttctggtaggagacgagaacctaaaacagttcccgcctccgtctgaatttttgctttcggtttggaaccgaagccgcgccgcgcgtcttgtctgctgcagcatcgttctgtgttgtctctgtctgactgtgtttctgtagttgtctgaaaat

SEQ ID NO: 1063 - DNA, 174 bp, synthetic construct
  misc_feature 1..174: note = Description of Artificial Sequence: Synthetic polynucleotide
  source 1..174: mol_type = other DNA
tcatcatcttcctcacctgcccctgagtcactgccggttggggtaagaactgagggggcaaagtcatcaatctcagcgtaaaagttttcgtgtctttcgttttcaggggactcatcctcctgacattttcgccagccgccgggcgggccggcctcctttcctggaaatccagcc

SEQ ID NO: 1064 - DNA, 174 bp, synthetic construct
  misc_feature 1..174: note = Description of Artificial Sequence: Synthetic polynucleotide
  source 1..174: mol_type = other DNA
gagtccccgcattctgccggggtaaaatccacggcgcgtttgttgaccatgttcagttgaacgactccgcccccgcgaatagctacggccgcttgccagtccccatcggcattccggttggtgctgtccgtctggacaaggatcgccctgggcccccactgactcatcgccgcg

SEQ ID NO: 1065 - DNA, 174 bp, synthetic construct
  misc_feature 1..174: note = Description of Artificial Sequence: Synthetic polynucleotide
  source 1..174: mol_type = other DNA
tatgcgcagacgcatgaagggtggggtgctgcccttcctaattccacttattgctgcggccattggagccgttcccggaattgcctcagtagccttgcaggcttctcgaaaaaattaaaataaaataaaacttccaacttattactggtactatgactgttttatgcagactaa

SEQ ID NO: 1066 - DNA, 549 bp, synthetic construct
  misc_feature 1..549: note = Description of Artificial Sequence: Synthetic polynucleotide
  source 1..549: mol_type = other DNA
caaaattgcgtgcgagaaagcacgcaaatcaaagtctagtgcgtaattcactcactaccggcgtaatttgtggttatgctattgcgttgagagtgttgtgggcgtagtacgggggcttttggtttgtgtgtgattaatatgcattcccagttttgtttagttttagattactgatttatttttcgaactacccgaatttatttaggctcttcgagaaataatgatgaactgtcctcaacaagtatgaaaagcaattatttgtgaagttacttgttgttgtaagattattgacctcttagatttttctaagttgtaatgctttgttttctgattgactagattatgaatccaattaaaaggagtagtggtctaatatagtctgtgtgacctgcaggcattttgtgaaaagggtaaagtatgaaagctactctcagaaaagtacttatgtattgatgagagccttaaaatgactttatattcacaaaactgctggaagacaatgatctggggtatcacattccctcttaggttaagtttcgcactactagg

SEQ ID NO: 1067 - DNA, 174 bp, synthetic construct
  misc_feature 1..174: note = Description of Artificial Sequence: Synthetic polynucleotide
  source 1..174: mol_type = other DNA
aaaaaaaagagctcagaggatttttatttttattttagagcttttgctggaattttgtagaggtgaagacagtgtagacgggaaaaacaaaagtaccactgctttacctgctgtaaaagactctgtaaaagactcctaggtaagtaatccctttttttttgtatttccaggttc

SEQ ID NO: 1068 - DNA, 174 bp, synthetic construct
  misc_feature 1..174: note = Description of Artificial Sequence: Synthetic polynucleotide
  source 1..174: mol_type = other DNA
cgtgtttcctgttttaacttttatggctgcttatggtgacaatttaacattgttaccatatagctgttgggttggccatccggattttgttataaaaccatttcctcgtgccttgacctttaacacatttgtgaacttctttaaatcccttttattagtccttaaatactaaga

SEQ ID NO: 1069 - DNA, 174 bp, synthetic construct
  misc_feature 1..174: note = Description of Artificial Sequence: Synthetic polynucleotide
  source 1..174: mol_type = other DNA
ttggtagtaatggggtcagtgtacttgagtgctaaaactcccggggggttttcctgtaacccgtcggaagaaacgaagggcggagctacatagggaatgctgggagttgaggaggtgtcataggggtagacggggttgaagtcgtcttcaattctggttcttttcatctgcaag

SEQ ID NO: 1070 - DNA, 174 bp, synthetic construct
  misc_feature 1..174: note = Description of Artificial Sequence: Synthetic polynucleotide
  source 1..174: mol_type = other DNA
cttgggttgtagatatagtcaatcaactggtctgacaagtcataccccaaacaatccaaatctggaatcacctgttcgctcagtagtaatatcttggcaaacactacactaacctcgtctgtactgtctgaaagtggtcaggattgattgacagttattatttatctttaagca

SEQ ID NO: 1071 - DNA, 174 bp, synthetic construct
  misc_feature 1..174: note = Description of Artificial Sequence: Synthetic polynucleotide
  source 1..174: mol_type = other DNA
gtgtctggaaacttgctctacccgtagctaacgtgacatatgccctgttcattgtaattgtactggtagttgtattaggggcggtgcttttctggaaataaattgcctttccgtacatatcctgcgcagatgtacgtgtatgctgttatcgattgtcccgtaaactaataaacg

SEQ ID NO: 1072 - DNA, 174 bp, synthetic construct
  misc_feature 1..174: note = Description of Artificial Sequence: Synthetic polynucleotide
  source 1..174: mol_type = other DNA
aagacaggtggaaatttttacgtagtagactgcagctgtttacctttcctaatgcatttcctgtaaatcagaaaggggatcccttgtatacactaaatgatgcaaactggaaatgcttcttccaaaggttgtgggctcggttagacttacacgagcaggacgaccaggaggaca

SEQ ID NO: 1073 - DNA, 174 bp, synthetic construct
  misc_feature 1..174: note = Description of Artificial Sequence: Synthetic polynucleotide
  source 1..174: mol_type = other DNA
tgggactttgtccccattgcattaatgtaggggcttggtataatggatggaaatttcgagaatttaccccagatttggtgcgatgtagctgccatgtgggagcttctaatcccttttctgtgctaacctgcaaaaaatgtgcttacctgtctggattgcaaagctttgtagatt

SEQ ID NO: 1074 - DNA, 174 bp, synthetic construct
  misc_feature 1..174: note = Description of Artificial Sequence: Synthetic polynucleotide
  source 1..174: mol_type = other DNA
gcagagacatctttaaaatatttacatagtagactaacaggatataattttccacataaactaccagtagatagtaatggcaatgtagtgtacaagatcactcatgcagattggaaatgttttttagcaagctggagcagcagttagacctgtgtgaaccagaggacagtacag

SEQ ID NO: 1075 - DNA, 174 bp, synthetic construct
  misc_feature 1..174: note = Description of Artificial Sequence: Synthetic polynucleotide
  source 1..174: mol_type = other DNA
aggctacacagtgtcctatcccgagtctagacaaaccacagatataatttttccacatcctgacacccccacagtagtaatccacatcaatgatacatcaggagattattatttacacccaagtctccaaaggaaaaaacgcaaacgcaaatatttataattttgtttttgcag

SEQ ID NO: 1076 - DNA, 174 bp, synthetic construct
  misc_feature 1..174: note = Description of Artificial Sequence: Synthetic polynucleotide
  source 1..174: mol_type = other DNA
cctactgggaaaagtagggaaatacccttcacaggacgaaaaggcgctgctgggggacaggaggagggttcgcagccctgagacttaaagaaggggacgagccctccgcctgaacctgaggagtgcaaaggcagcgctagtaagaaaaccgccgtggtgaatctagatagagac

SEQ ID NO: 1077 - DNA, 174 bp, synthetic construct
  misc_feature 1..174: note = Description of Artificial Sequence: Synthetic polynucleotide
  source 1..174: mol_type = other DNA
ctcagcctgcatatacgatcaaaaggaggatggcccccgctggctccctgagcgactaattagacacatcaataatcagacagcccccttgtgtgacaggccaagtaacccaaatacagccccagggccaaaaggctcgccctgaggagctccttttctcttcttccaggaaga

SEQ ID NO: 1078 - DNA, 174 bp, synthetic construct
  misc_feature 1..174: note = Description of Artificial Sequence: Synthetic polynucleotide
  source 1..174: mol_type = other DNA
cggaggcctctttaaaatacctgcagagtagaattacaagttttaagtttccacataaacttccattagatacaaatggaaatccaatatttattataactgacacagattggaaatgtttttttagcaagctggagcagcagttagacctttgtgacccagaagacagtacaa

SEQ ID NO: 1079 - DNA, 174 bp, synthetic construct
  misc_feature 1..174: note = Description of Artificial Sequence: Synthetic polynucleotide
  source 1..174: mol_type = other DNA
tggatattacatatcatatccagaaacaaggaatattccagaagttatatacactgagccagacacgactccaacaataataattcatacagaggatttcagtggtgattattatttacatccaagtttgagacgaagaaaaagaaaacgagcctatttgtaatttttttgcag

SEQ ID NO: 1080 - DNA, 174 bp, synthetic construct
  misc_feature 1..174: note = Description of Artificial Sequence: Synthetic polynucleotide
  source 1..174: mol_type = other DNA
ggaaatttccaataaactctggtgtaaggcttagagtgatggtcgaggtgccctatttagggtgaggagcctcggtggcagccccaccaaatcctctattggataggaacagctgtactgggcagttacagcagtcgtatggtaacacatgcggcgttccgaaataccatgcct

SEQ ID NO: 1081 - DNA, 518 bp, synthetic construct
  misc_feature 1..518: note = Description of Artificial Sequence: Synthetic polynucleotide
  source 1..518: mol_type = other DNA
ctgctagacttcgccacgcttacaccattgagaacacataggtggtgtaatattatgtgtttggctgcgtgtgtcacgagcacgatctatgggggaatctaacccaggtggtgttgtgtatgatgaggtacaagcccgtcaacaccacaggtggagagggacaggagtctcatttcccctccaaaaaacagcagtggtccgcccctcatgccctatgaaacattagggggccgacactagtgggcaagcccgatggtgtgggggactggatatgggaaccccagtccgttaaacccgtacggcttcgccagcctacaccggggggggcttaatccccttattttggcacctgaaaatattacttttgacactttaaacacacacaatgatcacgaggagacccatggagagtctccagaggttcctaaggcctcgatcgcgcctgccgggaggcagaatgtcccggttctccaacaaaatcaagaaaacgaagataatcacgcgctgggcggtagcga

SEQ ID NO: 1082 - DNA, 174 bp, synthetic construct
  misc_feature 1..174: note = Description of Artificial Sequence: Synthetic polynucleotide
  source 1..174: mol_type = other DNA
catcccacacaaagtacacaacaagcgttttgaaccacgttctatagacgaacgtgtcattcttggaggacttcatgattgcgatggtctcagttgagcattcaccttttaaataatttgcaaagggcgtgaccggatgttttaaagggtccagtcctcctcagatctcaaaca

SEQ ID NO: 1083 - DNA, 174 bp, synthetic construct
  misc_feature 1..174: note = Description of Artificial Sequence: Synthetic polynucleotide
  source 1..174: mol_type = other DNA
accgtgtttttcacctaaatttccgcgtacggtgtcaaagtcctgtgtttttacgtaggtgtcagctgatcgctagggtatttaaacctgacgagttccgtcaagaggccactcttgagtgccagcgagaagagttttctccttcgcgccgcaagtcagttctgcgctttgaaa

SEQ ID NO: 1084 - DNA, 691 bp, synthetic construct
  misc_feature 1..691: note = Description of Artificial Sequence: Synthetic polynucleotide
  source 1..691: mol_type = other DNA
gccccggacctcccaccgaggtggggggaaaggggccctggaccggccgggtggaaggcccggaaccggtccatcttcctcaaggttgaggaaggggtacgtctatcggtccggtcggtccgaaaggcgtctggatgcctagtgttagggttcgtaggtggtaaatcccagctaggcgtgaaagcgctataggataggcttatcccggtgaccgctgccccggaaccagccccgcggktctttggacacggtccacaggttgggggtaccggtgtgaataaccccccgactgaagcgtcagtcgttaaacggagacggtctcctgagatcgcaacgacgccccacgtacgggaacgccgccaaaaccttcgggacagctatgcgggttgacaatcccagtggggggccggggaccagctgattacttgtcctgcgagttcctcttgagactggccgaaaggcagccacggggccaccaaggcggcgcagcgctgcatgcggcaaggggaaaaatccttcgggtgacccctggtggcaatcccttcccttaggagcatgagtgtggtcgacacattcaccatggcttggctgtggttgctggtttgcttccccctcgcggggggggtgctcttcaactcgcggcaccagtgcttcaatggggaccattatgtgctttccaattgttgttccc

SEQ ID NO: 1085 - DNA, 184 bp, synthetic construct
  misc_feature 1..184: note = Description of Artificial Sequence: Synthetic polynucleotide
  source 1..184: mol_type = other DNA
aattactaatttgatctttaggttataatgttaggactataaaaattagcttaatgcatttagtaatttaaggcttagttatttaactttacttatcaagatggccgttggcagccccacgaaatctagattagtccgaatgtcctattttgattaggtggtcagataggtcagaaactcacct

SEQ ID NO: 1086 - DNA, 174 bp, synthetic construct
  misc_feature 1..174: note = Description of Artificial Sequence: Synthetic polynucleotide
  source 1..174: mol_type = other DNA
cattggacggtagcagatgaagaattgttaaaaaatataaaaaatgaaacagggtttcaagcacaagcagtaaaagattactttactttaaaaggtgcagctgcccctgtggcccattttcaaggaagtttaccggaagtgcccgcgtacaacgcctcagaaaaataccccagc

SEQ ID NO: 1087 - DNA, 174 bp, synthetic construct
  misc_feature 1..174: note = Description of Artificial Sequence: Synthetic polynucleotide
  source 1..174: mol_type = other DNA
cagaagccccattaaaatatttacatagcagaattcaagaatacaaatttccaaataaattgcgtttagatgcaaatggaaatccaataataacaattactgatgcagattggaaatctttttttagtaaactgtggaagcaattagacctgggcgatccagacgacagctcag

SEQ ID NO: 1088 - DNA, 174 bp, synthetic construct
  misc_feature 1..174: note = Description of Artificial Sequence: Synthetic polynucleotide
  source 1..174: mol_type = other DNA
tcaactctcaagatccttcctcttcttactttgttccgctcctcgcctagtcccaacacagcaatcaccaaccagatcgaagaaaccgcggcaggtcgacccaactgagcaacatcgactgcaacttcacacaagcctccaactggcctccaacagataccgcaaagaacccaa

SEQ ID NO: 1089 - DNA, 174 bp, synthetic construct
  misc_feature 1..174: note = Description of Artificial Sequence: Synthetic polynucleotide
  source 1..174: mol_type = other DNA
tgaggtggaaaatcgtttttcttttgaccgtaaacctcatatagaaaacggtataattcaacttgtggtttactcttatgtttgatgacgcgtgttatgttacgtcaaacataatatataaggatttcaccacaaaaccccattatctctgtttctgtgatcaaatccacaaag

SEQ ID NO: 1090 - DNA, 174 bp, synthetic construct
  misc_feature 1..174: note = Description of Artificial Sequence: Synthetic polynucleotide
  source 1..174: mol_type = other DNA
tgaaccatgctctttatgttttaaattttttaactttagatgcggaaggtaattcagccgcccagcgtttttggggagaacgatcctcatgtaaaaaaccacttgtacgatggaaggatccacttaccaatctgtggtatggaccagaccctgtattgatatggggacgagggc

SEQ ID NO: 1091 - DNA, 174 bp, synthetic construct
  misc_feature 1..174: note = Description of Artificial Sequence: Synthetic polynucleotide
  source 1..174: mol_type = other DNA
cctagaggacgtctggcctgtagctgcgtctgctgtgagtacaatcgggaccttactggagaaagctgcaggaactctcttcgggaatgttttcagcatactagcctatgctaaaccggtcattattgggataatacttatcattttacttttgttagtcatcagaatattgag

SEQ ID NO: 1092 - DNA, 174 bp, synthetic construct
  misc_feature 1..174: note = Description of Artificial Sequence: Synthetic polynucleotide
  source 1..174: mol_type = other DNA
gccattgtaactgtaacatatgatagtgaggaacaaaggcaacagtttttagatgttgtaaaaataccccctaccattagccacaaactgggatttatgtcactgcacctattgtaatttgtatatatgtaaatgtgtaaatatatggtattggtgtaatacaactgtacatgt

SEQ ID NO: 1093 - DNA, 174 bp, synthetic construct
  misc_feature 1..174: note = Description of Artificial Sequence: Synthetic polynucleotide
  source 1..174: mol_type = other DNA
gctagtattggatgtgcgcgtggaggctttgctggaagccaccgttgagcaccttgaaaatcgcatttcttttgatctagctgtgctttttcaccaacacagtgggggcgagagatgccatctgcgcgatctacaatttgaagtactgcgagatcgtttggaataaaaattaac

SEQ ID NO: 1094 - DNA, 174 bp, synthetic construct
  misc_feature 1..174: note = Description of Artificial Sequence: Synthetic polynucleotide
  source 1..174: mol_type = other DNA
acgagctgtatataaatcggcttgtttttggggcggtttgtacgctgggcacagttccctttgattctcatccggtgcaccaaagtctgaacgtgaagggcacgtccttgcctgtactggtgtttgcgaactttgaggccgcgtgtggcccctggactgtgtttctgtaaggtc

SEQ ID NO: 1095 - DNA, 174 bp, synthetic construct
  misc_feature 1..174: note = Description of Artificial Sequence: Synthetic polynucleotide
  source 1..174: mol_type = other DNA
ggtagtgtgtcccccccccctccaaccaatatggctgtcgtgtgtggttccgggttgcgcctccgtcctttccaccccccttccccctccttttttgttttgcgtgcgcttataagagcgggcccggggcccttcgcagcttcaccgagagcgccgtcgggccccgggtgcggg

SEQ ID NO: 1096 - DNA, 174 bp, synthetic construct
  misc_feature 1..174: note = Description of Artificial Sequence: Synthetic polynucleotide
  source 1..174: mol_type = other DNA
tgtttttttttttgttaacagtgtctgttttttttcttaaggtgcttttagagattatgccacacccatttccggagttgcagtattttttcgtataaatttaactaagattgtgcagttcttacatatttggatggccgattatcttaatcattaacgagaaaaaacatcgta

SEQ ID NO: 1097 - DNA, 174 bp, synthetic construct
  misc_feature 1..174: note = Description of Artificial Sequence: Synthetic polynucleotide
  source 1..174: mol_type = other DNA
ggcagaagcacagcattttcttgtgagcttcgagcactaataaaactgaaaatcaaaatgtccaacatggatattgacagtataaataccggaacaatcgataaaacaccagaagaactgactcccggaaccagtggggcaaccagaccaatcatcaagccagcaacccttgct

SEQ ID NO: 1098 - DNA, 174 bp, synthetic construct
  misc_feature 1..174: note = Description of Artificial Sequence: Synthetic polynucleotide
  source 1..174: mol_type = other DNA
gatacaatattaagtgatgattctcttaaacagtcagagttaattaacaacgatttggcgtggataattttaataatctccagtgtcctgcttttcgttataatagcttcaacccttctgtgtaaactaggaactcatcaacattgaaaattttgaaagcttcagtacttgaat

SEQ ID NO: 1099 - DNA, 174 bp, synthetic construct
  misc_feature 1..174: note = Description of Artificial Sequence: Synthetic polynucleotide
  source 1..174: mol_type = other DNA
cagtggcccctaacacaagaaaaactttctgccgcacaacagctggtgcaggaacagctgagacttggtcatattgaaccttctacttctgcttggaattctccaatttttgttataaaaaagaagtctggtaaatggaggttgttacaagatctccgtaaggtaaatgagacg

SEQ ID NO: 1100 - DNA, 174 bp, synthetic construct
  misc_feature 1..174: note = Description of Artificial Sequence: Synthetic polynucleotide
  source 1..174: mol_type = other DNA
attgtgatgtatgcagagatccaacgtttatgtacttaaggagtagattaacatgttttaactttccaaataagttaccattgtatgaaaatggagaaccaaaatttaaatttactgataattgctggacgtctttttttagcaagttttggaagcacttagatttacctgaag

SEQ ID NO: 1101 - DNA, 174 bp, synthetic construct
  misc_feature 1..174: note = Description of Artificial Sequence: Synthetic polynucleotide
  source 1..174: mol_type = other DNA
aagtgcgcgcggcgcgttgtcctcgcaccgggctttggatcgtccgtgatcgccgcggacgcctgcgacgttggctctcgcagcccgaggtgtgcgtgctctacgtcacgccagacttggacttttactgggtgctgccgggcggctttgccgtctcttcgcgcgtcactcttc

SEQ ID NO: 1102 - DNA, 174 bp, synthetic construct
  misc_feature 1..174: note = Description of Artificial Sequence: Synthetic polynucleotide
  source 1..174: mol_type = other DNA
gtctacttagaggggtatgtgattctggtaggggacggaaggctaaaacggtttccgcccccgtctgaatttttgctttcggtttggagccgaagccgcgccgcgtgtcttgtctgctgcagcatcgttctgtgttgtctctgtttgactgtttttctgtatttgtctgaaagc

SEQ ID NO: 1103 - DNA, 174 bp, synthetic construct
  misc_feature 1..174: note = Description of Artificial Sequence: Synthetic polynucleotide
  source 1..174: mol_type = other DNA
tacaatctggccctgatataacttttcctactgcacctatgggaacaccctttagtcctgtaactcctgctttacctacaggccctgttttcattacaggttctggattttatttgcatcctgcatggtattttgcacgtaaacgccgtaaacgtattcccttatttttttcag

SEQ ID NO: 1104 - DNA, 174 bp, synthetic construct
  misc_feature 1..174: note = Description of Artificial Sequence: Synthetic polynucleotide
  source 1..174: mol_type = other DNA
ccgctcccagcgatcccagcgtaagcgcacggcgagatcgcgagcgagggcgaccagctcgggttcccccgagaatttcatgaccagcatgaaggggacgagctgcttgccgaaggaccccatccaggtgtaggtttctacatcgtaggtgacaaagagccgctccgtgcgagg

SEQ ID NO: 1105 - DNA, 174 bp, synthetic construct
  misc_feature 1..174: note = Description of Artificial Sequence: Synthetic polynucleotide
  source 1..174: mol_type = other DNA
tacaatataatgacaatgtccaggtagtcctcattcttctcatagtagttggcttaataataatttccgctagtttaatattgctttattgccaccgcaaaaaaatcaaggccaaagttcaacatcaaccagtgcatatttgtttagaaaaataaaaatttttttcttttcagt

SEQ ID NO: 1106 - DNA, 174 bp, synthetic construct
  misc_feature 1..174: note = Description of Artificial Sequence: Synthetic polynucleotide
  source 1..174: mol_type = other DNA
gggaagctcacgtggacgagattacatcgtccgacaaaagttccgtcggatccatattgagaatttgttgccaaaacaaatcgtccggatgtgcagacatctagaggtgacaagccaggggaattaccttattttccgtatacaactataaaaaacttgggaggcgcaaacggt

SEQ ID NO: 1107 - DNA, 174 bp, synthetic construct
  misc_feature 1..174: note = Description of Artificial Sequence: Synthetic polynucleotide
  source 1..174: mol_type = other DNA
caggtaacctgggggatacggacggagaggactccaagtcagaagcatcggaagtggattattgtccacccaagaaaaggcgtgtgatttcagcaactccaccaaacagtccagtaagtggtccaagcctttctacctttttagatacttggcaatcacaacctagagacgacg

SEQ ID NO: 1108 - DNA, 174 bp, synthetic construct
  misc_feature 1..174: note = Description of Artificial Sequence: Synthetic polynucleotide
  source 1..174: mol_type = other DNA
gaatatccggcacttctgacgcttgtcttagtcattatagcctcagccatctacctgatgtacgtctgctttaacaagtttgtgaacacgctgctgacggattagatggggatatttaaaaggggcagcaatctcggctgtctgtacttcttctctgctcgttaaaccaatagc

SEQ ID NO: 1109 - DNA, 174 bp, synthetic construct
  misc_feature 1..174: note = Description of Artificial Sequence: Synthetic polynucleotide
  source 1..174: mol_type = other DNA
accagttaggagggatatgtggttctggtaggagacgagaacctaaaacagttcccgcctccgtctgaatttttgctttcggtttgggaccgaagccgcgccgcgcgtcttgtctgctgcagcatcgttctgtgttgtctctgtctgactgtgtttctgtatttgtctgagaat

SEQ ID NO: 1110 - DNA, 174 bp, synthetic construct
  misc_feature 1..174: note = Description of Artificial Sequence: Synthetic polynucleotide
  source 1..174: mol_type = other DNA
gtacacagaaacgcaaggattcagacgcatccgaacatgatcagaactcaaaatcaaaagcgtcagtggaaaaaaaccaacccctttaaacacgttttacaaatttttaactaataaatgctacccacatgaaatcacgtactatctttttctgtgttttatcttccatagagc

SEQ ID NO: 1111 - DNA, 174 bp, synthetic construct
  misc_feature 1..174: note = Description of Artificial Sequence: Synthetic polynucleotide
  source 1..174: mol_type = other DNA
acctagtgtatcctcggggctgtaatataatcagccatttaacacataacaagccctactgttttcttgttttgccgtgcatttagaataagagacaacttaaacctccgattcggcaacacagggaataatctcaccagacccggcagtgtcttcaggcttcatagccccaag

SEQ ID NO: 1112 - DNA, 174 bp, synthetic construct
  misc_feature 1..174: note = Description of Artificial Sequence: Synthetic polynucleotide
  source 1..174: mol_type = other DNA
ttgatggtttatatttaacgattattggaaaaattaaatgttcactagggttcttacataagatatttactatcacgtgcgcggggtcatattccgttgcaaacacagtaatagtcattgtgaatgtctttcagtttatcttccaacagcttttaatataagacaataggaatc

SEQ ID NO: 1113 - DNA, 174 bp, synthetic construct
  misc_feature 1..174: note = Description of Artificial Sequence: Synthetic polynucleotide
  source 1..174: mol_type = other DNA
ccctgccacagcattcacagtatatgtattttgttttttattgcccatgttactattgcatatacatgctatattgtctttacagtaattgtataggttgttttatacagtgtattgtacattgtatattttgttttataccttttatgctttttgtatttttgtaataaaagt

SEQ ID NO: 1114 - DNA, 174 bp, synthetic construct
  misc_feature 1..174: note = Description of Artificial Sequence: Synthetic polynucleotide
  source 1..174: mol_type = other DNA
cagatgtgcccaagcctggatgttgactccattatcccccggacaccagatgttttacacgaggatctcttaaatttctaactcccgttattgaaaccacgcctgcttcacgcctcgtttactaatggaatattaataaatatcttcctgtcggctctctttgaagtggttgcc

SEQ ID NO: 1115 - DNA, 741 bp, synthetic construct
  misc_feature 1..741: note = Description of Artificial Sequence: Synthetic polynucleotide
  source 1..741: mol_type = other DNA
ttaaaacagcctgtgggttgatcccacccacaggcccattgggcgctagcactctggtatcacggtacctttgtgcgcctgttttataccccctcccccaactgtaacttagaagtaacacacaccgatcaacagtcagcgtggcacaccagccacgttttgatcaagcacttctgttaccccggactgagtatcaatagactgctcacgcggttgaaggagaaagcgttcgttatccggccaactacttcgaaaaacctagtaacaccgtggaagttgcagagtgtttcgctcagcactaccccagtgtagatcaggtcgatgagtcaccgcattccccacgggcgaccgtggcggtggctgcgttggcggcctgcccatggggaaacccatgggacgctctaatacagacatggtgcgaagagtctattgagctagttggtagtcctccggcccctgaatgcggctaatcctaactgcggagcacacaccctcaagccagagggcagtgtgtcgtaacgggcaactctgcagcggaaccgactactttgggtgtccgtgtttcattttattcctatactggctgcttatggtgacaattgagagatcgttaccatatagctattggattggccatccggtgactaatagagctattatatatccctttgttgggtttataccacttagcttgaaagaggttaaaacattacaattcattgttaagttgaatacagcaaa

SEQ ID NO: 1116 - DNA, 174 bp, synthetic construct
  misc_feature 1..174: note = Description of Artificial Sequence: Synthetic polynucleotide
  source 1..174: mol_type = other DNA
ggcggcgagggcgcgacccacgcctcgaccggggtcctcacaaacacagaatctgtagacttggctggcctcatggtctcgtcaggccagctcacgggcttcaggcttatatgataaaatgggcgtggcagaatagtataagacgcgaggcctgggtgaggagagtccagagca

SEQ ID NO: 1117 - DNA, 174 bp, synthetic construct
  misc_feature 1..174: note = Description of Artificial Sequence: Synthetic polynucleotide
  source 1..174: mol_type = other DNA
cattcttaacatctggtcctgacatagtgtttccttctgttcctgcaggtacaccatatttgcctgtgtcaccttctatacctgccatatctgtactgattcgcggtactgattattatttgaatcctgcatactatttcagaaaacgccgaaagcgcatattagcatattagg

SEQ ID NO: 1118 - DNA, 174 bp, synthetic construct
  misc_feature 1..174: note = Description of Artificial Sequence: Synthetic polynucleotide
  source 1..174: mol_type = other DNA
gttggcattgggtgacattataaaaggtaaccgagctgacgcgggccctgacgctctccgcgggtgtttccatcattgtttgagatctgaggaggactggaccctttaaaacatccggtcacgccctttgcaaattatttaaaaggtgaatgctcaactgagaccatcgcaatc

SEQ ID NO: 1119 - DNA, 174 bp, synthetic construct
  misc_feature 1..174: note = Description of Artificial Sequence: Synthetic polynucleotide
  source 1..174: mol_type = other DNA
taacacaaccccacgcccttctaatacataaagtgtaatcacgtgatttgttgtggtttccgcatatgtaatacccgtttaaaagcctctcttcttaatgtatcgacagactgggttttgggtggtcatttgaccctgccaacaaccccccattattacgagtacttcaccaaa

SEQ ID NO: 1120 - DNA, 174 bp, synthetic construct
  misc_feature 1..174: note = Description of Artificial Sequence: Synthetic polynucleotide
  source 1..174: mol_type = other DNA
gttagacctagggttagggttagggcctagggttagggttagggttaatacccccctttttttaacccccccggggagtttaaagtaatttttgaaacgcgaggaatatctgtcttccagagcaacagtatcgcacaaaaaagtgtcccggcccgagcgcagtccgacttcccg

SEQ ID NO: 1121 - DNA, 174 bp, synthetic construct
  misc_feature 1..174: note = Description of Artificial Sequence: Synthetic polynucleotide
  source 1..174: mol_type = other DNA
gaacctggcccctgctattgttcccggggggcttctggctaagcagtttggtgataatatgagagagtatctacaactagaacttagagaagaacttagagccaagggcatgtcaattgatgatgccattcttaatttgctacaggtgacacaggagcaagatattttgtcatt

SEQ ID NO: 1122 - DNA, 174 bp, synthetic construct
  misc_feature 1..174: note = Description of Artificial Sequence: Synthetic polynucleotide
  source 1..174: mol_type = other DNA
ctggcccaaacggaggatcctaggtgggtgtgcatttattagacgttggtgtgttgaaggacggatcaggcggggaggaggggtgggggagacttactgcagcactaggttaggttgaaagccggggtaaaaggcgtggctaaacaacacctatactacttgttattgtaggcc

SEQ ID NO: 1123 - DNA, 174 bp, synthetic construct
  misc_feature 1..174: note = Description of Artificial Sequence: Synthetic polynucleotide
  source 1..174: mol_type = other DNA
aacaaaggacgtctggccagcagcagcttctgctctacaaggaattggtaactttttatctgggactgcccaaggaatatttggaactgcctttagtctcttgggatacttaaagcctatcctaataggagtaggggtcattctcttggttattcttatatttaagattgtatc

SEQ ID NO: 1124 - DNA, 174 bp, synthetic construct
  misc_feature 1..174: note = Description of Artificial Sequence: Synthetic polynucleotide
  source 1..174: mol_type = other DNA
ttttttaatcctgtttttttaccattgtattggatatgtgttaagaatgagatgtcctaacggatgggcaagcagccaatgattcttaattcttaaagcgtgtgattcagtatctgtttttataatacggagagctgccgagctgagcggaacagagctttggctgtgacgagg

SEQ ID NO: 1125 - DNA, 174 bp, synthetic construct
  misc_feature 1..174: note = Description of Artificial Sequence: Synthetic polynucleotide
  source 1..174: mol_type = other DNA
gcaagacacctgcaaatcgcagtcgtcgccgtagacgcacaagcaaaccgactcccggcgccctggtgcggcaagtgtaccgcaatggtagtgcggaacctttgacactgccgcgtgcgcgttaccatccgagtatcatcacttaatcaatgttgccgctgcctccttgcagat

SEQ ID NO: 1126 - DNA, 174 bp, synthetic construct
  misc_feature 1..174: note = Description of Artificial Sequence: Synthetic polynucleotide
  source 1..174: mol_type = other DNA
gaaggttatgctgtgtcatatcctgaacgaaggaattatccagaaattatttatcctcaacccgatttgccaactgtaataattcatactgcagatacctctggggacttctatttacatccaagccttcgcaggcgaaaacgtaaacgcacttatttatgatatttctttcag

SEQ ID NO: 1127 - DNA, 174 bp, synthetic construct
  misc_feature 1..174: note = Description of Artificial Sequence: Synthetic polynucleotide
  source 1..174: mol_type = other DNA
cccttgttggagcggtcgcgttttctctgttcccgtcgtgccggttcctaccccccgctccctgggaccgccccctaccccccacctccccgtttgggcctcccccctcgcaccacccctttcctcgtccgtctgcggggagggcgtgtgtaaaaaatcgggcctccggccacc

SEQ ID NO: 1128 - DNA, 174 bp, synthetic construct
  misc_feature 1..174: note = Description of Artificial Sequence: Synthetic polynucleotide
  source 1..174: mol_type = other DNA
taaatgtactataattgttcagtctaaaaataatgttgggtatttataattaccgcccccgtgttacttggaaacacccatacatatgttccactctacatcaaacttctcgcagttttcttgttcccgcacacgtttacacgtccggattcaagtcgcaacgctgctgacaaa

SEQ ID NO: 1129 - DNA, 174 bp, synthetic construct
  misc_feature 1..174: note = Description of Artificial Sequence: Synthetic polynucleotide
  source 1..174: mol_type = other DNA
aagaagttacacaaagaatggacttaagaaatcaacaaagtgtacattcaggagagtttatagaaaaaactattgccccaggaggtgctaatcaaagaactgctcctcaatggatgttgcctttacttctaggcctgtacgggactgtaacacctgctcttgaagcatatgaag

SEQ ID NO: 1130 - DNA, 174 bp, synthetic construct
  misc_feature 1..174: note = Description of Artificial Sequence: Synthetic polynucleotide
  source 1..174: mol_type = other DNA
aatcaatgggaattactaccttagttcagtatgccgtgggaattatgacagtaaccatgacatttaaattggggccccgtaaagctacgggacggtggaatcctcaacctggagtatatcccccgcacgcagcaggtcatttaccatatgtactatatgaccctacagctacag

SEQ ID NO: 1131 - DNA, 174 bp, synthetic construct
  misc_feature 1..174: note = Description of Artificial Sequence: Synthetic polynucleotide
  source 1..174: mol_type = other DNA
taccgttgatcgggaaatgctcggatggtgtggttatgcacgtaaagaacattttataatgatgtaataaaatgttggcgccaaaaaaatacagtatataatgtgttggtcatttcatttgtttttaaagcacagaaggcgcgagttggtgctaggacttcgttcttgacagag

SEQ ID NO: 1132 - DNA, 174 bp, synthetic construct
  misc_feature 1..174: note = Description of Artificial Sequence: Synthetic polynucleotide
  source 1..174: mol_type = other DNA
atgcaaagctacggtatttgcacagtagaatacatgtgttacagtttttaaatccatttccaattgatgtgaatggaaatcctgtataccaattaaataatgcaaactggaaatgtttttttgaaaggacatggtccagattagatttggataacgacgaagacaaggaaaacg

SEQ ID NO: 1133 - DNA, 174 bp, synthetic construct
  misc_feature 1..174: note = Description of Artificial Sequence: Synthetic polynucleotide
  source 1..174: mol_type = other DNA
attcggccgatgatagcagcgtgctggacttgggtgggagaggaaggggcaacccgtttgctcatttgcgccctcgcttgggtggtatgttgtaaaaaaaaataaaaaaaaaactcaccaaggccatggcgacgagcgtacgttcgttcttctttattatctgtgtctagtata

SEQ ID NO: 1134 - DNA, 174 bp, synthetic construct
  misc_feature 1..174: note = Description of Artificial Sequence: Synthetic polynucleotide
  source 1..174: mol_type = other DNA
gcacaatcggtatgaacatcatcctctgcacggactgtatcataatgaaaatgattatccgtaatttattaaatacattaagcaaatactgtctattaagcttcaattttataaacatgttttccagaacaaaaatgcaaacaaggaaatgataacgacgtcattcaaagcgcc

SEQ ID NO: 1135 - DNA, 174 bp, synthetic construct
  misc_feature 1..174: note = Description of Artificial Sequence: Synthetic polynucleotide
  source 1..174: mol_type = other DNA
aaatgaatctaaaccctctacgggaacgatatgaaaaatccgcagaaattagcgatcacattcttgccgctctacgtgatcccaacgtacacgttgtgtattaaagcattgtataaaaacacgcatgcgggcttgctgttctcatttctaggttttgtcttaaatacacccgcc

SEQ ID NO: 1136 - DNA, 174 bp, synthetic construct
  misc_feature 1..174: note = Description of Artificial Sequence: Synthetic polynucleotide
  source 1..174: mol_type = other DNA
cagcaaaggataatagatggccatatttagaaagtagaataacagtatttgaatttccaaatgcatttccatttgataaaaatggcaatccagtatatgaaataaatgacaaaaattggaaatgtttttttgaaaggacatggtccagattagatttgcacgaggaagaggaag

SEQ ID NO: 1137 - DNA, 174 bp, synthetic construct
  misc_feature 1..174: note = Description of Artificial Sequence: Synthetic polynucleotide
  source 1..174: mol_type = other DNA
acgagttcgaggggcgggtctgtatagccctgcgggccctcatctacaccttcaagacgtaccaggtatttgtgccgaagcccaccgcgctggccacatttgtccgcgaggccggcgcgctgctcagacgacactcgatctctctcctgtccctggagcacaccctctgtacct

SEQ ID NO: 1138 - DNA, 174 bp, synthetic construct
  misc_feature 1..174: note = Description of Artificial Sequence: Synthetic polynucleotide
  source 1..174: mol_type = other DNA
tactattctatattggctgcttatggtgacaattgaaagattgttaccatatagctattggattggccatccggtgtcaaacagagcaatcatttatttgtttgttggttttatacctctgaactttaaagtgctaaagactctcaattttatattatatctcaacaaatcagg

SEQ ID NO: 1139 - DNA, 174 bp, synthetic construct
  misc_feature 1..174: note = Description of Artificial Sequence: Synthetic polynucleotide
  source 1..174: mol_type = other DNA
acccgacgccgaaccaccactggaacccgccgccgccgtcgccgtcgccagcccgtgctggccccgatttccgtgcgcagggtggctcgcgaaggaggcaggaccctggtgctgccaacagcgcgctaccaccccagcatcgtttaaaagccggtctttgtggttcttgcagat

SEQ ID NO: 1140 - DNA, 174 bp, synthetic construct
  misc_feature 1..174: note = Description of Artificial Sequence: Synthetic polynucleotide
  source 1..174: mol_type = other DNA
acctgggaccgcaatgtccagggttagtagtcagcggcatcgtcggtgtgctttgtgggttagcagttataatcatctgcatgttcatttttgcttgctgctacagaaggcttcaccgacagaaatcagacccactgctgaacctctatgtttaatttttgattttccagagcc

SEQ ID NO: 1141 - DNA, 174 bp, synthetic construct
  misc_feature 1..174: note = Description of Artificial Sequence: Synthetic polynucleotide
  source 1..174: mol_type = other DNA
caattcagttttagatttaagtaagtttgaatgtaaacataaagccactgttgttgttacacttaaagatagtgatgtaaatgatatggttttgagtttgattaagagtggtaggttgttgttacgcaataatggtcgttttggtggttttagtaatcatttagtctcaactaa

SEQ ID NO: 1142 - DNA, 174 bp, synthetic construct
  misc_feature 1..174: note = Description of Artificial Sequence: Synthetic polynucleotide
  source 1..174: mol_type = other DNA
tactaattttgaaaggcggggttctgccaggcatagtctttttttgtggcggcccttgtgtaaacctgtctttcagaccttgttggacatcccgtacaatcaagatgttcctgtatgttgtttgcagtctggcggtttgctttcgaggactattaagcctttctctgcaatcgt

SEQ ID NO: 1143 - DNA, 174 bp, synthetic construct
  misc_feature 1..174: note = Description of Artificial Sequence: Synthetic polynucleotide
  source 1..174: mol_type = other DNA
aggctgggcggcatgccaagatcgctgagacgtcagttccccgtgacgtgggccctggccagcctgactgacttcctgaaatctttgtaaatgaataaacagtgggtgttgcgtgatgagtaaagtgtaacatttaatgtgggactgggaggccggggcgataccttgggcatc

SEQ ID NO: 1144 - DNA, 174 bp, synthetic construct
  misc_feature 1..174: note = Description of Artificial Sequence: Synthetic polynucleotide
  source 1..174: mol_type = other DNA
agtgtgtccccctccattccacccactgataatacgcccgacaataaagttgatgatattgaattccacacctgcttgtgtttgtgattttatttcatattccatgagagagacctcgcatatttgcagaagggtcactgaaacatcttatcttaaaacagttacacctgaata

SEQ ID NO: 1145 - DNA, 174 bp, synthetic construct
  misc_feature 1..174: note = Description of Artificial Sequence: Synthetic polynucleotide
  source 1..174: mol_type = other DNA
ccagttcaaggtggagtgggcctgtacaatctgttaaagaagcagccggagcggccctcatcccggtaggtactaggcacatctggattccgtggcgtctcctgaaacgaggtgcatgcccaagacccggagacagcgtaaccaccgaatcaaaacacaaagaccttcaactcc

SEQ ID NO: 1146 - DNA, 432 bp, synthetic construct
  misc_feature 1..432: note = Description of Artificial Sequence: Synthetic polynucleotide
  source 1..432: mol_type = other DNA
gtgcaatctgaaactccgcctggtctttccaggtctagaggggtgacactttgtactgtgcatgactccacgttcgatccactggcgagtgctagtagtagtactgctgtttcgtagcggaacacgacggccgtgggactccccccttggtaacaaggacccgcggggccaaaagccacgtctctgacccgtcgtgtgtgcaaacccagcacagcagctttactgcgaaaaccactttaaggtgacattgatactggtactcacgcactggtgacaggctaaggatgcccttcaggtaccccgaggcaacaagcgacactcgggatctgagaaggggactggggcttctgtaaaagcgcccagtttaaaaagcttctatgcctgaataggtgaccggaggccggcacctttccctctactaccactgactct

SEQ ID NO: 1147 - DNA, 174 bp, synthetic construct
  misc_feature 1..174: note = Description of Artificial Sequence: Synthetic polynucleotide
  source 1..174: mol_type = other DNA
attctaggtggccttatttacataatagattggtggtgtttacatttcctaatgagtttccatttgacgaaaacggaaatccagtgtatgagcttaatgataagaactggaaatcctttttctcaaggacgtggtccagattaagtttgcacgaggacgaggacaaggaaaacg

SEQ ID NO: 1148 - DNA, 174 bp, synthetic construct
  misc_feature 1..174: note = Description of Artificial Sequence: Synthetic polynucleotide
  source 1..174: mol_type = other DNA
tatttaatgtaaatgatacttatgatttcatctattttctagttttaggttttctgccaataccggccattatataaggcgggatgttgttgtgttgattacgtcaatacggatggggttttgaatataaagacttacagagcttttaatgaatcattgcttcgtttcttcggg

SEQ ID NO: 1149 - DNA, 174 bp, synthetic construct
  misc_feature 1..174: note = Description of Artificial Sequence: Synthetic polynucleotide
  source 1..174: mol_type = other DNA
gttactagtaagaagttattagttggtgtttcaacgagttttagacgtgtattaggagcggttgctttacacacagttagtgcggtctgcactgcctccgagaaaattttagcatccttttcatttaatttagtcgtttctttataaattgcagctagagcaatatctgtgtcc

SEQ ID NO: 1150 - DNA, 174 bp, synthetic construct
  misc_feature 1..174: note = Description of Artificial Sequence: Synthetic polynucleotide
  source 1..174: mol_type = other DNA
agaccggggaccggtcactaccaaggacgcagacctctttttgagtatcacgcctccggaagtagttgggcaagcccacctatatgtgttgggatggttggggttagccatccataccgtactgcctgatagggtccttgcgaggggatctgggagtctcgtagaccgtagcac

SEQ ID NO: 1151 - DNA, 174 bp, synthetic construct
  misc_feature 1..174: note = Description of Artificial Sequence: Synthetic polynucleotide
  source 1..174: mol_type = other DNA
ccgtgtttttcacctaaagttccgcgtacggtgtcaaagtccggtgtttttacgtaggtgtcagctgatcgtcagggtatttaaacctgcgctctgcagtcaagaggccactcttgagtgccagcgagaagagttttctcctccgcgccgcgagtcagatctacactttgaaat

SEQ ID NO: 1152 - DNA, 174 bp, synthetic construct
  misc_feature 1..174: note = Description of Artificial Sequence: Synthetic polynucleotide
  source 1..174: mol_type = other DNA
ttatgccgagtcatatgcggaagtgatttttttcgcgggcttttggggttttttttgtgttgtgtaggcgaactttggccatttacgtcactatttttcagtattaaaggtgcgcacttgcggcagattgtgtctgctgtgcctggctttgtactgtttttctggtaaggcatt

SEQ ID NO: 1153 - DNA, 174 bp, synthetic construct
  misc_feature 1..174: note = Description of Artificial Sequence: Synthetic polynucleotide
  source 1..174: mol_type = other DNA
cgtaggggtttcctgatattttcttgatgccttttttgaattgaggctatagctcgtccgaatcccgatgaccaggtgacggtcggagatctcgctgaagccgtcttgtatgtgactatttccatctgtttttagtggcgcttcgagttcgttttttctgaagtggatctgccg

SEQ ID NO: 1154 - DNA, 174 bp, synthetic construct
  misc_feature 1..174: note = Description of Artificial Sequence: Synthetic polynucleotide
  source 1..174: mol_type = other DNA
tgcttccttatacaattttgagaggttaataagaaggaagtagtgctatcttaataattaggttaactatttagttttactgttcaggatgcctattggcagccccataatatccaggacaccctctctgcttcttatatgattaggttgtcatttagaataagaaaataacct

SEQ ID NO: 1155 - DNA, 174 bp, synthetic construct
  misc_feature 1..174: note = Description of Artificial Sequence: Synthetic polynucleotide
  source 1..174: mol_type = other DNA
cttgtcctggccttctggtccaggagagggtaaatagacctgcacagttaaggcctaaatggaaaaagcctactcctattttgaaggtattaaatcctaaaactgtggtaatagctggcccaggcggccaggaaagaattgtgtctatagataatctgaagaagacacctcatc

SEQ ID NO: 1156 - DNA, 174 bp, synthetic construct
  misc_feature 1..174: note = Description of Artificial Sequence: Synthetic polynucleotide
  source 1..174: mol_type = other DNA
ccatcaagcaagtgttgtagaataccaggggtttcacaggctgctaaacttactaaattttacataggattatataattcttttcgatacacgttatatctttagcaaagtgaggaaaacagctttatcatgttagatgccagttatccattttaagtgaatcctttcctcaac

SEQ ID NO: 1157 - DNA, 174 bp, synthetic construct
  misc_feature 1..174: note = Description of Artificial Sequence: Synthetic polynucleotide
  source 1..174: mol_type = other DNA
gacgtcacggtaagttgaagaaccttttaacgccaatcaaaatatttttataggctcctcctacctaacattatataaacggtactacgactgtataatgtgtacacataccccaggcaacatttcagatagtaccacgtcacgattgcattgtgtgaatttaacccctcagct

SEQ ID NO: 1158 - DNA, 174 bp, synthetic construct
  misc_feature 1..174: note = Description of Artificial Sequence: Synthetic polynucleotide
  source 1..174: mol_type = other DNA
atccaaagtataaatatctgcatagtagaattaaagcatttgagtttgtaaataagtttccatttaaggacgatggcagtcccttgtttgaacttactgaccaaagctggaaatctttttttcaaaggctttggaggcaattagatctaagtgaccaagaagacgagggtgagg

SEQ ID NO: 1159 - DNA, 174 bp, synthetic construct
  misc_feature 1..174: note = Description of Artificial Sequence: Synthetic polynucleotide
  source 1..174: mol_type = other DNA
gaattgctgggatcgttgcggttgtcgcctttggtggtccgcaaccgcagccagaccgcagtggtggccacggtggtgtctcagacgtcgtgcgtcaaacatgacgtgctgaacttttccttggtataaaattcactcagtggcggcgtagccattgtcttccgttcatccacc

SEQ ID NO: 1160 - DNA, 174 bp, synthetic construct
  misc_feature 1..174: note = Description of Artificial Sequence: Synthetic polynucleotide
  source 1..174: mol_type = other DNA
agctccggtgccagtaattcacaaggagtgaaaacccttgccgctatacgtaaattctgcctgccggacaaaaactgtttcagaaatttcctttctttttctacaacattatttaaggttccctcatcgatagatatatattttctcttcttcacagcttccacagtatccaca

SEQ ID NO: 1161 - DNA, 174 bp, synthetic construct
  misc_feature 1..174: note = Description of Artificial Sequence: Synthetic polynucleotide
  source 1..174: mol_type = other DNA
ctgaagacctgagacccgatcatttggtgcttgcctgcactggagcggagttcggttccagtggtgaagaaactgactaaagtgagtagtgggggcaagatgtggatggggactttcaggttggtaaggtggacagattgggtaaattttgttaatttctgtcttgcagctgcc

SEQ ID NO: 1162 - DNA, 174 bp, synthetic construct
  misc_feature 1..174: note = Description of Artificial Sequence: Synthetic polynucleotide
  source 1..174: mol_type = other DNA
cccctgtcaacagcattggaatttaacttactgtcccccaccagtgtcgccctttgtgatcaatactgaatatttagactataatcccttgcttgcttacggcggtctcgcagctcttattttattcctgatttctaacttgtttctagtgcaacatttgtattcatactaaca

SEQ ID NO: 1163 - DNA, 174 bp, synthetic construct
  misc_feature 1..174: note = Description of Artificial Sequence: Synthetic polynucleotide
  source 1..174: mol_type = other DNA
ctactgcagaggaggagttttgtccgtaccggatagactccaagtgtcacaattgtggctgtcgcataagggtgacagtcgctgcaactgaatttggaatacgttgttttgagcaactgttactgaaagagctttgtttattttgtcctgcgtgctccagacaacttccccgca

SEQ ID NO: 1164 - DNA, 237 bp, synthetic construct
  misc_feature 1..237: note = Description of Artificial Sequence: Synthetic polynucleotide
  source 1..237: mol_type = other DNA
aaattcaaatagttaagatttaattaggattaattaccgatattgtaatcttctattattttatcggtttgaatctcccttacacatatgattatgtagcgtgcttattagtagtagatacatctaaattctacaacgacctaataagttttgattatataagataggatgtgaaggctccgatttgtgaataggtttttatattcgaagtaggtagtattgcgcatactattaatt

SEQ ID NO: 1165 - DNA, 174 bp, synthetic construct
  misc_feature 1..174: note = Description of Artificial Sequence: Synthetic polynucleotide
  source 1..174: mol_type = other DNA
acagtgtgcaatcggttcaccgtaaattatcattgatatctgttatatcctaataagcattcaaaatccaatcctcccctgaataacagcccaatccgcaaagtactttgggtataggtataatccaagttgaattctcaagtagacaactaggcctttgagtatcctgtgatc

SEQ ID NO: 1166 - DNA, 174 bp, synthetic construct
  misc_feature 1..174: note = Description of Artificial Sequence: Synthetic polynucleotide
  source 1..174: mol_type = other DNA
ggaggattacaagtgggaatttgaagagcttttgaaatcctgtggtgagctgtttgattctttgaatctgggtcaccaggcgcttttccaagagaaggtcatcaagactttggatttttccacaccggggcgcgctgcggctgctgttgcttttttgagttttataaaggataa

SEQ ID NO: 1167 - DNA, 174 bp, synthetic construct
  misc_feature 1..174: note = Description of Artificial Sequence: Synthetic polynucleotide
  source 1..174: mol_type = other DNA
catttatttatattaaatactgacactttgcgggttaaaatgtttaatactatttttcaatttgaggttgtatgagataattttgatttctatgttatcattgaataagggagtctggccctaattgatgtacgactcttctttggttgcgacccgagtcccttctacatcaag

SEQ ID NO: 1168 - DNA, 174 bp, synthetic construct
  misc_feature 1..174: note = Description of Artificial Sequence: Synthetic polynucleotide
  source 1..174: mol_type = other DNA
tgctatctatgtggtacatatgtatcgtaatcgagataaataaagtttttaaagttgcaaaagccgtttttattattcccaatgtcgaaaaaaacgtttccatcatttaaattccgcggtgggtgttttaatcttttatttaaggggagcgtggatgtgtcaataaaaaccagg

SEQ ID NO: 1169 - DNA, 148 bp, synthetic construct
  misc_feature 1..148: note = Description of Artificial Sequence: Synthetic polynucleotide
  source 1..148: mol_type = other DNA
gaattcgtcgattcggttgcagcatttaaagcggttgacaactttaaaagaaggaaaaagaaggttgaagaaaagggtgtagtaagtaagtataagtacagaccggagaagtacgccggtcctgattcgtttaatttgaaagaagaaa

SEQ ID NO: 1170 - DNA, 174 bp, synthetic construct
  misc_feature 1..174: note = Description of Artificial Sequence: Synthetic polynucleotide
  source 1..174: mol_type = other DNA
tacaatgagagcttactgtgctgctctttaatcacacggaccaatttttgtatgtccgcaagggccacccagtgggtaccctgctgctaaaaagagtcatttttccttcagtaaaaatagccaccttggtttagtgcatgctttgtgtttttcagactttcatctctactaacc

SEQ ID NO: 1171 - DNA, 174 bp, synthetic construct
  misc_feature 1..174: note = Description of Artificial Sequence: Synthetic polynucleotide
  source 1..174: mol_type = other DNA
ggacggtagtgattggttaagatttggtgtaaggttcatgtgccaacgccctgtgcgggatgaaacctctactgccctaggaatgccaggcaggtaccccacctccgggtgggatctgagcctgggctaattgtctacgggtagtttcatttccaatccttttatgtcggagtc

SEQ ID NO: 1172 - DNA, 419 bp, synthetic construct
  misc_feature 1..419: note = Description of Artificial Sequence: Synthetic polynucleotide
  source 1..419: mol_type = other DNA
gtcttcttgacgagcattcctaggggtctttcccctctcgccaaaggaatgcaaggtctgttgaatgtcgtgaaggaagcagttcctctggaagcttcttgaagacaaacaacgtctgtagcgaccctttgcaggcagcggaaccccccacctggcgacaggtgcctctgcggccaaaagccacgtgtataagatacacctgcaaaggcggcacaaccccagtgccacgttgtgagttggatagttgtggaaagagtcaaatggctctcctcaagcgtattcaacaaggggctgaaggatgcccagaaggtaccccattgtatgggatctgatctggggcctcggtgcacatgctttacatgtgtttagtcgaggttaaaaaacgtctaggccccccgaaccacggggacgtggttttc

SEQ ID NO: 1173 - DNA, 174 bp, synthetic construct
  misc_feature 1..174: note = Description of Artificial Sequence: Synthetic polynucleotide
  source 1..174: mol_type = other DNA
gtaagcgactcccttccgtggtttggtggaaaagtcacaagggtaccatagcgaggaaccccggttcgaaaccggcaggatccgctatgagcacaagtgaggcgcttgcgcgttgaacccggccaaggacccccagacacggagaggagtctttttttatttattttttcttag

SEQ ID NO: 1174 - DNA, 174 bp, synthetic construct
  misc_feature 1..174: note = Description of Artificial Sequence: Synthetic polynucleotide
  source 1..174: mol_type = other DNA
aagggatcagacgtgtattttattagattaacggagtgcatgactatcgcgaaaaggcccagaaaaaggccgagtcgcgagatgtgaagcatgtcgggtgagttgaccacaatgaatttgtacaagtagaatgtgtgactaaaatagtatttgctttttttataggattggacg

SEQ ID NO: 1175 - DNA, 174 bp, synthetic construct
  misc_feature 1..174: note = Description of Artificial Sequence: Synthetic polynucleotide
  source 1..174: mol_type = other DNA
tccggcccctgaatgtggctaaccttaaccctgcagccgttgcccataatccaatgggtttgcggtcgtaatgcgtaagtgcgggatgggaccaactactttgggtgtccgtgtttcctgtttttcttttgattgcattttatggtgacaatttatagtgtatagattgtcatc

SEQ ID NO: 1176 - DNA, 174 bp, synthetic construct
  misc_feature 1..174: note = Description of Artificial Sequence: Synthetic polynucleotide
  source 1..174: mol_type = other DNA
tatgagtgtgttcagtccaataatattaaaggactgtacatttatgcaaacaacagttaccataactcaaatcttgccaggttctaaggaagcaataattttcccagtttacgatataggcaaattattatcagctcttgttttttcagagaacggtgtacttttgaaactata

SEQ ID NO: 1177 - DNA, 174 bp, synthetic construct
  misc_feature 1..174: note = Description of Artificial Sequence: Synthetic polynucleotide
  source 1..174: mol_type = other DNA
ctgttttacgtatgtccatctgcccttccgaggacgaccagtaaccttaccatcatgcttaattgatattaataatcaatgggccattctaggccgagatgtcctccagcaatgccaaagttccctttaccttgcagaccaaccctctcgcgttctaccaatccagacacctag

SEQ ID NO: 1178 - DNA, 174 bp, synthetic construct
  misc_feature 1..174: note = Description of Artificial Sequence: Synthetic polynucleotide
  source 1..174: mol_type = other DNA
tgtacatttggaggaaattgctcagaaaaagattaaggaaatttgcattagatgcatttgctgccttagattacttgatattgttgagaaattagatttattatactctgacgagacttgctatttaataaggggtttgtggaggggctattgcagaaattgtattaggaaaca

SEQ ID NO: 1179 - DNA, 174 bp, synthetic construct
  misc_feature 1..174: note = Description of Artificial Sequence: Synthetic polynucleotide
  source 1..174: mol_type = other DNA
tgacaatggcgactagcctcccaagccagccacccagggcgagtcatcgacccaaaaggtcagaccgtctcacacaaacaatcccaagtaaaggctctgacgtctccccctttttttaggaactgaaaccacggccctgacgtccctcccccctaggaacaggaacagctctcc

SEQ ID NO: 1180 - DNA, 174 bp, synthetic construct
  misc_feature 1..174: note = Description of Artificial Sequence: Synthetic polynucleotide
  source 1..174: mol_type = other DNA
ctaactttttaacgaggtgtaagcatcaggttaatctaagacagtcacctattttcctgaccctcctgaggcacatccgccgacgtctgggcctgggccgtgcttccgtaaaacgagagattacccttctcctggcccacctgcgcaaaaagacagcccccatccactgccgtg

SEQ ID NO: 1181 - DNA, 174 bp, synthetic construct
  misc_feature 1..174: note = Description of Artificial Sequence: Synthetic polynucleotide
  source 1..174: mol_type = other DNA
agactgggaggagttgggggaggagattaggttaaaggtctttgtactaggaggctgtaggcataaattggtctgttcaccagcaccatgcaactttttcccctctgcctaatcatctcatgttcatgtcctactgttcaagcctccaagctgtgccttgggtggctttggggc

SEQ ID NO: 1182 - DNA, 174 bp, synthetic construct
  misc_feature 1..174: note = Description of Artificial Sequence: Synthetic polynucleotide
  source 1..174: mol_type = other DNA
ccagccgcgggctccgcgtcctcgtcgatcaccagcggtcgcgtcggcaccggagaatccacgtcatcctgcacgtcgttttcctcctctccgtcgtcatcgtccagaaacggcacccgctgcttagcccaggacattctttttccgcgtcctcaatcagcggcgccgatcgcc

SEQ ID NO: 1183 - DNA, 174 bp, synthetic construct
  misc_feature 1..174: note = Description of Artificial Sequence: Synthetic polynucleotide
  source 1..174: mol_type = other DNA
agctagcgaacttcaattacctaaactagaatcctgctgtgatgaatacttgcgatttacagacggtgatgtgatagaactgacatgtgacgacggaaacatgtgagtttttactgtatgggacaatacttttcgtcttagaaacaaactcatttcttaatttctcgttcgcag

SEQ ID NO: 1184 - DNA, 174 bp, synthetic construct
  misc_feature 1..174: note = Description of Artificial Sequence: Synthetic polynucleotide
  source 1..174: mol_type = other DNA
agcaaaagcaggtactgatccaaaatggaagactttgtgcgacaatgcttcaatccaatgattgtcgagcttgcggaaaaggcaatgaaagaatatggggaagatccgaaaatcgaaacgaacaaatttgccgcaatatgcacgcacttagaagtctgtttcatgtattcagat

SEQ ID NO: 1185 - DNA, 174 bp, synthetic construct
  misc_feature 1..174: note = Description of Artificial Sequence: Synthetic polynucleotide
  source 1..174: mol_type = other DNA
gatgactcagctgacgacagtagtgtattagatttaggagggtcaggaaacccatttgctcatttgcgcccacagggttgcatagggtcattgtattaaattgaataaaagcatacttaccaaagccatggcgaccagtgttcgtcttattttccttcttccgttagctgtgaa

SEQ ID NO: 1186 - DNA, 717 bp, synthetic construct
  misc_feature 1..717: note = Description of Artificial Sequence: Synthetic polynucleotide
  source 1..717: mol_type = other DNA
gagaggagcccgttttcgggcacttgtctcctaaacaatattggcgcgcatttgcgcgcccccccccatttcagccccctgtcattgactggtcgaaggcgttcgcaataagactggtcgtcacttggctgttctatcgtttcaggctttagcgcgccctcgcgcggcgggccgtcaagcccgtgcgctgtatagcgccaggtaaccggacagcggcttgctggattttcccggtgccattgctctggatggtgtcaccaagctgacaaatgcggactgaacctcacaaagcgacacacctgtggtagcgctgcccaaaagggagcggaactcccccgccgcgaggcggtcctctctggccaaaagcccagcgttaatagcgccttttgggatgcaggagccccacctgccaggtgtgaagtggagtgagtggatctccaatttggtctgttctgaactacaccatctactgctgtgaagaatgccctggaggcaagctggttacagccctgaccaggggccctgcccgtgactctcgatcggcgcagggtcaaaaattgtctaagcagcagcaggaacgcgggagcgtttcttttccctttgtatcgacatgatggcggcgtctaaggtgtatagagtttgcgagcagactctgctagcaggcgccgttcgcatgatggacaaatttttgcaaaagagaactgtttttgtccccca

SEQ ID NO: 1187 - DNA, 174 bp, synthetic construct
  misc_feature 1..174: note = Description of Artificial Sequence: Synthetic polynucleotide
  source 1..174: mol_type = other DNA
cacttatcataagaggtggaattctttaaggataatcaatatacaaaattccacgacaattggcgcccaacgtggggctcgaatataagtcgggtcttattaaaaaagacttatttaggtcttacaattatccctagggaccttcacgcactgcggaaggaataagcactcaaa

SEQ ID NO: 1188 - DNA, 174 bp, synthetic construct
  misc_feature 1..174: note = Description of Artificial Sequence: Synthetic polynucleotide
  source 1..174: mol_type = other DNA
ataatatcctgatgaattctatagaacttaggattaagaaaaaattcatgatgaagattaaaaccttcatcatcctttaaaaagagagctattctttatctgaatgtccttattaatgtctaagagctattattttgtaccctcttagcctagacactgcccagcatataagcc

SEQ ID NO: 1189 - DNA, 174 bp, synthetic construct
  misc_feature 1..174: note = Description of Artificial Sequence: Synthetic polynucleotide
  source 1..174: mol_type = other DNA
tgtagcatcacctgagctgcttcctgatagcgaactgacagagcttatatgcaatgatttggatgactttgtacaactaatgctacgcatggagattcgggatcggggttttgagcctaatgttaatcttttaaatgaactgcaggtgacacgggaacctgatctttttcaacc

SEQ ID NO: 1190 - DNA, 174 bp, synthetic construct
  misc_feature 1..174: note = Description of Artificial Sequence: Synthetic polynucleotide
  source 1..174: mol_type = other DNA
tattgtatggatatctgagtttattgtgtacacatctgtgctagtactaacactgcttttatatttactattgtggctgctattaacaacccccttgcaatttttcctactaactctacttgtgtgttactgtcccgcattgtatatacactactatattgttaccacacagca

SEQ ID NO: 1191 - DNA, 174 bp, synthetic construct
  misc_feature 1..174: note = Description of Artificial Sequence: Synthetic polynucleotide
  source 1..174: mol_type = other DNA
ccaaccgtgggtcgtgtggacgccgcatatttagagagtaaatcccgcacccccctggcaaactccggtcctctagtgagggatacccggtgagttggtggaggtaaaagacccaacacttgcctacccaggcgagccgcattttcagcctgcaccttcatatccacgccggca

SEQ ID NO: 1192 - DNA, 174 bp, synthetic construct
  misc_feature 1..174: note = Description of Artificial Sequence: Synthetic polynucleotide
  source 1..174: mol_type = other DNA
ggtgatcataaacacgcccaggaagtgacgtatgacagccaatcagcattgagcatatagcctatataaaccgatgcacttccgcatctcgtcagactgcatccggtctccggcgagtgaacatctctggaaagagctccacgcttgtggtgagtgacactatggccttttctg

SEQ ID NO: 1193 - DNA, 174 bp, synthetic construct
  misc_feature 1..174: note = Description of Artificial Sequence: Synthetic polynucleotide
  source 1..174: mol_type = other DNA
atggaatggccccgacccagtgttaatatggggcagaggttcagtctgtgtatactctcaagcccatgatgcagccagatggttaccagaacggctagtaaggcaaataaacaatgaaaatcagtccagggagtcatattctccctgagatcatctctcctcttacctacagaa

SEQ ID NO: 1194 - DNA, 174 bp, synthetic construct
  misc_feature 1..174: note = Description of Artificial Sequence: Synthetic polynucleotide
  source 1..174: mol_type = other DNA
gtttttcaagaacgtggtatcttttacatgtttgagacctacataaaagtgactcagagttcggatacggcgttgcctgatttggagcgaccccgacccgcgaccccgcccttcagtgagacttcgtaactcccgctcgggcaccaccggctagtgtatgccgcgttagcagcc

SEQ ID NO: 1195 - DNA, 655 bp, synthetic construct
  misc_feature 1..655: note = Description of Artificial Sequence: Synthetic polynucleotide
  source 1..655: mol_type = other DNA
ccccttcccccgaagtaacttagaagctgtaaatcaacgatcaatagcaggtgtggcacaccagtcataccttgatcaagcacttctgtttccccggactgagtatcaataggctgctcgcgcggctgaaggagaaaacgttcgttacccgaccaactacttcgagaagcttagtaccaccatgaacgaggcagggtgtttcgctcagcacaaccccagtgtagatcaggctgatgagtcactgcaacccccatgggcgaccatggcagtggctgcgttggcggcctgcccatggagaaatccatgggacgctctaattctgacatggtgtgaagagcctattgagctagctggtagtcctccggcccctgaatgcggctaatcctaactgcggagcacatgctcacaaaccagtgggtggtgtgtcgtaacgggcaactctgcagcggaaccgactactttgggtgtccgtgtttccttttattcctatattggctgcttatggtgacaatcaaaaagttgttaccatatagctattggattggccatccggtgtgcaacagggcaattgtttacctatttattggttttgtaccattatcactgaagtctgtgatcactctcaaattcattttgaccctcaacacaatcaaac

SEQ ID NO: 1196 - DNA, 174 bp, synthetic construct
  misc_feature 1..174: note = Description of Artificial Sequence: Synthetic polynucleotide
  source 1..174: mol_type = other DNA
atgttttataagtacaaccattttttcccagagacctatgaagattgttggaaagggatttattatttgtttgttctgtttattttggcttgcattgcatatcatgattatataagtccttcaatagcagagaatatgttatcatttatcaggtgctctaaatatccctagaag

SEQ ID NO: 1197 - DNA, 174 bp, synthetic construct
  misc_feature 1..174: note = Description of Artificial Sequence: Synthetic polynucleotide
  source 1..174: mol_type = other DNA
ataaataacataaccaatagaaacttaatacagagtcacgccccattacaacaaggataaaacacgggatcattttcttaacattgtagtagcgctgaaaagcgtcccctcccccggctcacagagctgctcttcggtgtagttgggtatactggtgcgcctcatttaatcgcg

SEQ ID NO: 1198 - DNA, 174 bp, synthetic construct
  misc_feature 1..174: note = Description of Artificial Sequence: Synthetic polynucleotide
  source 1..174: mol_type = other DNA
ttgagctgtccgaggagcaccctcagggcccggcccacggagtgcggatcgtcgtcgaagggggcctagactcccacctgcttcgtatcttcagccagcgcccgatcctggtccagcgccaacagggcaacaccctcctgaccctttactgcatctgcaaccaccccggcctgc

SEQ ID NO: 1199 - DNA, 174 bp, synthetic construct
  misc_feature 1..174: note = Description of Artificial Sequence: Synthetic polynucleotide
  source 1..174: mol_type = other DNA
agtccgcccccctccttattccactgatcgccgcggcgattggcgccgtgcccggaattgcatccgtggccttgcaggcgcagagacactgattaaaaacaagttgcatgtggaaaaatcaaaataaaaagtctggactctcacgctcgcttggtcctgtaactattttgtaga

SEQ ID NO: 1200 - DNA, 174 bp, synthetic construct
  misc_feature 1..174: note = Description of Artificial Sequence: Synthetic polynucleotide
  source 1..174: mol_type = other DNA
ttgtttttctgagaacatcagctctggtattttcccatgccttgcaaaatggcgttactgcagttagctggctaagccttatgaaggggtctttcattcccccctctttctgtaaactgaataaaatcttttattcacgtgatttttaatcttttactgtcttaagtagccaac

SEQ ID NO: 1201 - DNA, 174 bp, synthetic construct
  misc_feature 1..174: note = Description of Artificial Sequence: Synthetic polynucleotide
  source 1..174: mol_type = other DNA
tcggcagaggatcattgtgttctgatcccaccgccgcgtctagagaggcgcgctctgccatctgactctttctcttgcctctacgctactcgatctcgccgccgtttctggtttctttttgttttgtttctgataagcctctgtgtcggagtttctctcttcgaaatcttcgaa

SEQ ID NO: 1202 - DNA, 174 bp, synthetic construct
  misc_feature 1..174: note = Description of Artificial Sequence: Synthetic polynucleotide
  source 1..174: mol_type = other DNA
ttccgattacgattttacgatttcattaaatgtaatttgtgtaattcatctttaaagagaaagagaaatcctctgacaataaaaaattgaacagtgaagcttgcttaaaactttgaaaattttttgtgattttaaataaaatttaaaatcaatttatcctaagcttttcaggct

SEQ ID NO: 1203 - DNA, 174 bp, synthetic construct
  misc_feature 1..174: note = Description of Artificial Sequence: Synthetic polynucleotide
  source 1..174: mol_type = other DNA
acatgcctgcaatatgcatgtgtaaagccaagttctggagttaatataataaatcgtttttggcaaaatatcgcgctgtttggaaaagttgaagaaatctttacgtcctgttcatgtttccaaattatagactgatacgctttctgaattgcatctatatcgcatgatcgcaac

SEQ ID NO: 1204 - DNA, 174 bp, synthetic construct
  misc_feature 1..174: note = Description of Artificial Sequence: Synthetic polynucleotide
  source 1..174: mol_type = other DNA
gtatcctgcccctccttattccactgatcgccgcggcgattggcgccgtgcccggaattgcatccgtggccttgcaggcgcagagacactgattaaaaacaagttgcatgtggaaaaatcaaaataaaaagtctggagtctcacgctcgcttggtcctgtaactattttgtaga

SEQ ID NO: 1205 - DNA, 174 bp, synthetic construct
  misc_feature 1..174: note = Description of Artificial Sequence: Synthetic polynucleotide
  source 1..174: mol_type = other DNA
atgaagctagcttaatgtatttaaagagtagactagtattttttaagtttcctaacaaattacctttaaaagaaaatgatgaagtactttatgaaattactgatgcatcatggaaatgtttttttatcaaatttgcaagccatttagagctgacagccagaggagacgagcagc

SEQ ID NO: 1206 - DNA, 174 bp, synthetic construct
  misc_feature 1..174: note = Description of Artificial Sequence: Synthetic polynucleotide
  source 1..174: mol_type = other DNA
cattgtgatcggggtggtcatcctagcgatgctgctctacttcatcttctgccgccgcatccccaacgcgaaaccggtctacaagcccatcgttatcgggcagccggagccgcttcaggtggagggaggtctaaggaatcttctcttctcttttacagtatggtgatttgaact

SEQ ID NO: 1207 - DNA, 174 bp, synthetic construct
  misc_feature 1..174: note = Description of Artificial Sequence: Synthetic polynucleotide
  source 1..174: mol_type = other DNA
caaaattttactttgattgattttgcaaggagttataaaaatcttgaaggataaattgttataaagtagagtcgaagaacattaaatgttctttgttagaattattcatctaagttgtttttgagtatattcgcttcaatacaactcctctttatatttgatttaagttttaaa

SEQ ID NO: 1208 - DNA, 174 bp, synthetic construct
  misc_feature 1..174: note = Description of Artificial Sequence: Synthetic polynucleotide
  source 1..174: mol_type = other DNA
gcgacagcgcaataaggtctctgttgaaattttctcccagcagcacctcacttccctcttcccaactctggtattctaaaccccgttcagcggcatactttctccatactttaaaggggatgtcaaattttagctcctctcctgtacccacaatcttcatgtctttcttcccag

SEQ ID NO: 1209 - DNA, 174 bp, synthetic construct
  misc_feature 1..174: note = Description of Artificial Sequence: Synthetic polynucleotide
  source 1..174: mol_type = other DNA
ttttcgttgctaagtttgtgactctctccctttattgccttgtttgctggtgggttttgaaattgacatggtaattaataaacagcgttcgtgctttagagtatgagtttgattgtatttgtctctgtgcatttcacttgtttttttttctctgatcatttgcatgttgctagt

SEQ ID NO: 1210 - DNA, 174 bp, synthetic construct
  misc_feature 1..174: note = Description of Artificial Sequence: Synthetic polynucleotide
  source 1..174: mol_type = other DNA
gtagggaagccaggaatgtccaggaggtaccccttccgctcggaagggatctgacctggagacacatcacatgtgctttacacctgtgcttgtgtttaaaaattgtcgcagcttccccaaaccaagtggtcttggttttctctttttattatattgtcaatatggcttgcaaac

SEQ ID NO: 1211 - DNA, 174 bp, synthetic construct
  misc_feature 1..174: note = Description of Artificial Sequence: Synthetic polynucleotide
  source 1..174: mol_type = other DNA
aataaattacgaaaacgtgcatgcgttttttatttttacaatgcgccgtatatggtatgtctgtcatgtgctctaaagtcccatatataaaagaagccccaacgagtgtatgcgtattgcgtaccgcgaccctgggatgttttacaggcgcgtttgtttgtctcggttataagt

SEQ ID NO: 1212 - DNA, 174 bp, synthetic construct
  misc_feature 1..174: note = Description of Artificial Sequence: Synthetic polynucleotide
  source 1..174: mol_type = other DNA
gtcctaaaagttcgcaaggagtaaaacttcgcgaaagcacacactctttgggaacaccaaaagctagcaaacttctgatcttttttttctcattttcaatgagattatttaaggaagtttcatcaattgtctgatgtttccttttttgaagcatttccattgttcgcaagcgaa

SEQ ID NO: 1213 - DNA, 174 bp, synthetic construct
  misc_feature 1..174: note = Description of Artificial Sequence: Synthetic polynucleotide
  source 1..174: mol_type = other DNA
accaaacaagaggaaaaacttgtttggaatatataataatattaaatagtattttagggttaaagtaatactttaaagggacaagtcacagacatttgatcttagtataaatttttataatggccgggctactaagtacttttgacacatttagttccaggagaagtgagagca

SEQ ID NO: 1214 - DNA, 174 bp, synthetic construct
  misc_feature 1..174: note = Description of Artificial Sequence: Synthetic polynucleotide
  source 1..174: mol_type = other DNA
cgcgtgcggttttctgggtgttttttgtggactttaaccgttacgtcattttttagtcctatatatactcgctctgcacttggcccttttttacactgtgactgattgagctggtgccgtgtcgagtggtgtttttttaataggttttcttttttactggtaaggctgactgtt

SEQ ID NO: 1215 - DNA, 129 bp, synthetic construct
  misc_feature 1..129: note = Description of Artificial Sequence: Synthetic polynucleotide
  source 1..129: mol_type = other DNA
cgacagcgccctgcgaattggtgtgcccacaccgcgcggcttgcgaataatactttggagagtcttttgcctccagtgtcttccgtttgtactcgtcctcctctccctctccggccgggatgggacagg

SEQ ID NO: 1216 - DNA, 174 bp, synthetic construct
  misc_feature 1..174: note = Description of Artificial Sequence: Synthetic polynucleotide
  source 1..174: mol_type = other DNA
gacgctctagaatgattattagctttaccagtaaatctcaaagacaaatgtttttaagtattatgaaattaccaaagggcgttgattggtctcttgggtgctttgactctatttaacacactaacctttctagtttttttactaacacatacgtttcaatagaattgttaatgc

SEQ ID NO: 1217 - DNA, 280 bp, synthetic construct
  misc_feature 1..280: note = Description of Artificial Sequence: Synthetic polynucleotide
  source 1..280: mol_type = other DNA
acttggttatgaattcattgtattaacccctctgaaagacctgctctggcgcgagctaaagcgcaattgtcaccaggtattgcaccaatggtggcgacagggtacagaagagcaagtactcctgactgggtaatgggactgcattgcatatccctaggcacctattgagatttctctggggcccaccagcgtggagttcctgtatgggaatgcaggactggacttgtgctgcctgacagggtcgcggctggccgtctgtactttgtatagtcagttgaaa

SEQ ID NO: 1218 - DNA, 174 bp, synthetic construct
  misc_feature 1..174: note = Description of Artificial Sequence: Synthetic polynucleotide
  source 1..174: mol_type = other DNA
agacaatcactattagctgctaaggtttgaatgctgcttgttttgcccgcacccgcagtaccggttattaataatactctaaaaggtaaaaatggcaacggttgagcaaattcttcatcacctatagaatgaatttcttcaaaattgctattaaattctaattcaggatcaaga

SEQ ID NO: 1219 - DNA, 174 bp, synthetic construct
  misc_feature 1..174: note = Description of Artificial Sequence: Synthetic polynucleotide
  source 1..174: mol_type = other DNA
gctggtacaagagtgcacgaaagtggatgtggattatagatgactgaattgtgttgccgcgtcttaaatgggtttgttcttttataaagtttcaaatttgtttctattgtattccacagagatgcggcagattttttggaagaaattgcaaacgatctgtgaattctaaatatc

SEQ ID NO: 1220 - DNA, 174 bp, synthetic construct
  misc_feature 1..174: note = Description of Artificial Sequence: Synthetic polynucleotide
  source 1..174: mol_type = other DNA
tcaggtgacatatctactacattatcagattataatattttagatgcatccttgatagtaaaatcaaatgtttctgaacagcccctttttgttttagattattcagattatgatttacatccaggtcttcttccaaaaagaagacgcatagattatttttaatttattttacag

SEQ ID NO: 1221 - DNA, 174 bp, synthetic construct
  misc_feature 1..174: note = Description of Artificial Sequence: Synthetic polynucleotide
  source 1..174: mol_type = other DNA
ggtttgtgtgggtattctgggtatttcctgttttgtaggactgaaggagataatatactttatatttgttagtgttaattccatgtggcctttttgtaataagttattgactacggcggttaactgtttcttcaagggccgtacctttcttcgacgtgaattaaagatttaaaa

SEQ ID NO: 1222 - DNA, 174 bp, synthetic construct
  misc_feature 1..174: note = Description of Artificial Sequence: Synthetic polynucleotide
  source 1..174: mol_type = other DNA
agttcctcctaatgactgaagcaccaacagagtttcccccagaagatgggaccccacggagggacttagggagtgactgggtaatagaaactctgagggaaataaaggaagaagccttaagacattttgatccccgcttgctaattgctcttggctactatatccataatagac

SEQ ID NO: 1223 - DNA, 174 bp, synthetic construct
  misc_feature 1..174: note = Description of Artificial Sequence: Synthetic polynucleotide
  source 1..174: mol_type = other DNA
atgctggtgttgatatctatagtccaactgctagtgttggatcacctactataaatcctactgatcttgacattccattaattattatacatttagataattcaacaggggattatgatttacatccaagtttgcgtaaacgtcgcaaattagttcatatttgatattttacag

SEQ ID NO: 1224 - DNA, 174 bp, synthetic construct
  misc_feature 1..174: note = Description of Artificial Sequence: Synthetic polynucleotide
  source 1..174: mol_type = other DNA
atactgggcctgatattgtactacctacttcagcacagtggccatatgtgcccctgtcacctgctgacaccacccattatgtgtacatagatggcggggatttctatctttggcctgttacctttcacttctcccgacatcgtcgccgtaaacgtgtctcatatttttttgcag

SEQ ID NO: 1225 - DNA, 174 bp, synthetic construct
  misc_feature 1..174: note = Description of Artificial Sequence: Synthetic polynucleotide
  source 1..174: mol_type = other DNA
ctcggttgtaacgcgcttaggaagtcccctcgaggtatggcagatatgctcttgcatagggggaaaaaatgtagtcttaatattgtctgtgtgctgcaggagctaagctgactctgctggtggcctcgcgtaccactgtggccaggcggtagctgggacgtgcagccgaccacc

SEQ ID NO: 1226 - DNA, 174 bp, synthetic construct
  misc_feature 1..174: note = Description of Artificial Sequence: Synthetic polynucleotide
  source 1..174: mol_type = other DNA
ggaaatatgtatataacattaaagatataactttttattaaaaaaaggggaacacaagtcccgacacgtaccgtggcaccttggaggaagggccctcgtcaggattatcagggtccatctttctcttggcagaggactccatcgtgtcaaggacggtgactgcagaaaggatcc

SEQ ID NO: 1227 - DNA, 174 bp, synthetic construct
  misc_feature 1..174: note = Description of Artificial Sequence: Synthetic polynucleotide
  source 1..174: mol_type = other DNA
gggtggctttttgccagctcttatacccatcatcgccgcagcgatcggggcgataccaggcatagcttccgtggcggttcaggcctcgcagcgccactaacattggaaaaacttataaataaaaaatagaatggactctgacgctcctggtcctgtgactatgtttttgtagag

SEQ ID NO: 1228 - DNA, 174 bp, synthetic construct
  misc_feature 1..174: note = Description of Artificial Sequence: Synthetic polynucleotide
  source 1..174: mol_type = other DNA
gcgtgctcgtgaaaacgctgtcctccgcctcctcatccgccggcgtgtcctcgttgctcgaggggatataaatcaccgtcgagggttcgccagagcgacgtgacgagctgcgacgccgcgacgacatcctctcgtctgctgaggtgcgttcggctcagttgcttacctgcatac

SEQ ID NO: 1229 - DNA, 174 bp, synthetic construct
  misc_feature 1..174: note = Description of Artificial Sequence: Synthetic polynucleotide
  source 1..174: mol_type = other DNA
ggttcgacggcccatgacgatttagaatacaccgagccattcctttatttccccccatccccggtcgcttatgcgtgtcaaacactaccaataaagataatctgccaatcgcaccttatatataatatgtggtcgcgtgtggtctttttaaggagctctgaaacacagacaggt

SEQ ID NO: 1230 - DNA, 174 bp, synthetic construct
  misc_feature 1..174: note = Description of Artificial Sequence: Synthetic polynucleotide
  source 1..174: mol_type = other DNA
atgaatggctaattgacaccttagcagaagttcaagaagaagctttaaagcattttgatagacgcttattgcatgcagtaggaagctggatctacaaaacctatggggatacattagaaggggtgcgacagcttatctcaattcttcaaaaagctctgtctatgcactatagat

SEQ ID NO: 1231 - DNA, 174 bp, synthetic construct
  misc_feature 1..174: note = Description of Artificial Sequence: Synthetic polynucleotide
  source 1..174: mol_type = other DNA
gtggatgtgacggaggacctgcgacccgatcatttggtgttgtcctgcaccgggacggagttcggctccagtggggaagaatctgactagagtgagtagtgttttggggagggagaggacctgcataaggggcagaatgattaaaatctgtgcttttctgtgtgttgcagcagc

SEQ ID NO: 1232 - DNA, 510 bp, synthetic construct
  misc_feature 1..510: note = Description of Artificial Sequence: Synthetic polynucleotide
  source 1..510: mol_type = other DNA
acttagaagcacaatgtccaagttcaataggagggggtacaaaccagtaccaccacgaacaagcacttctgttcccccggtgaggctgtataggctgtttccacggctaaaagcggctgatccgttatccgctcatgtacttcgagaagcctagtatcaccttggaatcttcgatgcgttgcgctcaacactcaaccccagagtgtagcttaggtcgatgagtctggacgttcctcaccggcgacggtggtccaggctgcgttggcggcctacctgtggcccaaagccacaggacgctagttgtgaacaaggtgtgaagagcctattgagctacctgagagtcctccggcccctgaatgcggctaatcctaaccacggagcaggcagtggcaatccagcgaccagcctgtcgtaacgcgcaagttcgtggcggaaccgactactttgggtgtccgtgtttccttttatttttacaatggctgcttatggtgacaatcattgattgttatc

SEQ ID NO: 1233 - DNA, 174 bp, synthetic construct
  misc_feature 1..174: note = Description of Artificial Sequence: Synthetic polynucleotide
  source 1..174: mol_type = other DNA
gagggttttgctggctccattgtatattaagatgcaaattgagacaccgcctactgtgctgatagccaatgaaaaaatatctcccgtcagcacatataatactatataaggacattaccaccacctctttctttgcagagattctctgcttgcacatctgtaacactgaccata

SEQ ID NO: 1234 - DNA, 174 bp, synthetic construct
  misc_feature 1..174: note = Description of Artificial Sequence: Synthetic polynucleotide
  source 1..174: mol_type = other DNA
ttaaaatcagtcagcaaatctttgtccagcttattcagcatcacctcctttccttcctcccaactctggtatctcagccgccttttagctgcaaactttctccaaagtttaaatgggatgtcaaattcctcatgttcttgtccctccgcacccactatcttcatattgttgcag

SEQ ID NO: 1235 - DNA, 697 bp, synthetic construct
  misc_feature 1..697: note = Description of Artificial Sequence: Synthetic polynucleotide
  source 1..697: mol_type = other DNA
attgatgtgttggtcgtttgccaatcggagggcgacaggcacaggtcgctccgagttctagtagtgtgggaacttgttactactgatgaaacgaggtagtgacactcagtacctgcgaacgaggtcggggccctcccttcttccttcacccaactttcacttttcgttccactttagcaggggtcttctttctatccccctggcggcattggaactagccgtcgcgtcttaacgcgcagccctgaaggccccacaccttgtggatcttgccgtgggtatgtttctggcatgtgtttctcaagcctgcaaccgaagccgaacagccacatgaacagtttgagcgtggtagcgctgtgtgagttggcggtggatccccctcgtggtaacacgagcccccgtggccaaaagcccagtgtttacagcacctctcacatccaggacgaccccatcctggcgctcactcttagtagtatggcttagtacgcattaggtggtaagccgagctctccctcggccttgttctgaatgcacacatgtctaggggctaaggatgtcctacaggtacccgcacgtaaccttcagagagtgcggatctgagtaggagaccgtggtgcactgctttacagatgcagcccggtttaaaaagcgtctatgcccctacagggtagcggtgggccgcgccctttccttttaaaac

SEQ ID NO: 1236 - DNA, 174 bp, synthetic construct
  misc_feature 1..174: note = Description of Artificial Sequence: Synthetic polynucleotide
  source 1..174: mol_type = other DNA
gcgtgttaaatgtggttcatccttcttctgagtggactattttgattcctaatgttccagatgaaattattcagcctgctatggcagtagatgtttatgatgacttttatttacatcctcatcttcttaggcgacgcaaacgaaaacggttggattttttttaatgttttacag

SEQ ID NO: 1237 - DNA, 174 bp, synthetic construct
  misc_feature 1..174: note = Description of Artificial Sequence: Synthetic polynucleotide
  source 1..174: mol_type = other DNA
aaataggttaagtgtctgtatccaacattaataaaatgtagtcgggcatctaatgaaggcagcattatatcgtacagttttggtaacatagggagaaaagctatttcaatttcaactcgggaagataattgttcataaagaatttctatatctgttttggcattgtcgttagac

SEQ ID NO: 1238 - DNA, 174 bp, synthetic construct
  misc_feature 1..174: note = Description of Artificial Sequence: Synthetic polynucleotide
  source 1..174: mol_type = other DNA
cccttagaggaggggtatgtggttctggtaggagacagagggctaaaacggtttccgcccccgtctgagtttttgctttcggtttggaaccgaagccgcgccgcgcgtcttgtctgctgcagcatcgttctgtgttgtctctgtttgactgtttttctgtatttgtctgaaaac

SEQ ID NO: 1239 - DNA, 174 bp, synthetic construct
  misc_feature 1..174: note = Description of Artificial Sequence: Synthetic polynucleotide
  source 1..174: mol_type = other DNA
aaagcttaccttaaatttgatatcagttgtttgtcaagtttttccagcagcaccacctgcccttcctcccaactttcgtacgggatgtgccaacgggcggcaaactttctccacgtcctaaagggtatatcggtgttcacctttttaccctgacccacaatcttcatcttgcag

SEQ ID NO: 1240 - DNA, 174 bp, synthetic construct
  misc_feature 1..174: note = Description of Artificial Sequence: Synthetic polynucleotide
  source 1..174: mol_type = other DNA
gttattttagataacagtatatgagtggcatgggtctagacaacttgatcattatattaagaaaaacttaggatccaagaccataaatctaggatcctttacaatctcagaccctggtgcaaggttatatatagagcccaattctcctaattaaacagtgtctcaggttgacaa

SEQ ID NO: 1241 - DNA, 174 bp, synthetic construct
  misc_feature 1..174: note = Description of Artificial Sequence: Synthetic polynucleotide
  source 1..174: mol_type = other DNA
tcagtgaaaacgtgcctgctctcacagatcacgggacgctaccgctgcgcagcagtatccgcggagtccagcgagtgaccgtcactgacgcccgtcgccgcacctgtccctacgtctacaaggccctgggcatagtcgcgccgcgcgtgctttccagtcgcaccttctaaaaaa

SEQ ID NO: 1242 - DNA, 174 bp, synthetic construct
  misc_feature 1..174: note = Description of Artificial Sequence: Synthetic polynucleotide
  source 1..174: mol_type = other DNA
ttccctgctgacgcagtttcggggtgtgtgttgggcttggcgggattttttacactttactcccattacgtcagtttagggcttgtgtatatattgtggagaggttggagagcgtctttagagcttctttagagcttgtgctttgtgcgcccgctatactttgtctggtaagcc

SEQ ID NO: 1243 - DNA, 174 bp, synthetic construct
  misc_feature 1..174: note = Description of Artificial Sequence: Synthetic polynucleotide
  source 1..174: mol_type = other DNA
cctctcctgaagttcttaacttatttacattgattcaacaggttctccattgccgccaacacccctgtttctttggacatattcgtgcacactccacccttcctggtgccctcgtacaaggcaatcacactgcggacgttcttactaaacaagtgtttttccaatcagctattg

SEQ ID NO: 1244 - DNA, 174 bp, synthetic construct
  misc_feature 1..174: note = Description of Artificial Sequence: Synthetic polynucleotide
  source 1..174: mol_type = other DNA
tggggctttgccctcattgtattaatgtgggagcttggtataatggatggaaatttagagagtttactccagacttagtgcgctgcagttgtcatgtaggagcctctaacccattttctgtgttaacttgtaaaaaatgtgcttacctgtctggattacaaagttttgtagatt

SEQ ID NO: 1245 - DNA, 174 bp, synthetic construct
  misc_feature 1..174: note = Description of Artificial Sequence: Synthetic polynucleotide
  source 1..174: mol_type = other DNA
cattggactgtagcagatgaagagcttttaaaaaatataaaaaatgaaactgggtttcaagcacaagtagtaaaagactactttactttaaaaggtgcagctgcccctgtggcccattttcaaggaagtttgccggaagttcccgcttacaacgcctcagaaaaatacccaagc

SEQ ID NO: 1246 - DNA, 174 bp, synthetic construct
  misc_feature 1..174: note = Description of Artificial Sequence: Synthetic polynucleotide
  source 1..174: mol_type = other DNA
tagtttcatatcctgaaatggtaaatgtaaacaaaattgaaatccctgcaactacattagtgccctctgaaccagacattagactagattggttttctccagattatgatttgcacccttctttacttcgtagacgacgcaaacgcaaacgcaatatgttttgatgttttgcag

SEQ ID NO: 1247 - DNA, 174 bp, synthetic construct
  misc_feature 1..174: note = Description of Artificial Sequence: Synthetic polynucleotide
  source 1..174: mol_type = other DNA
attcttatactggctgcttatggtgacaattgaaagattgttaccatatagctattggattggccatccggtgtgcaacagagctattatttacctatttgttgggtatataccactcacatccagaaaaaccctcgacacactagtatacattctttacttgaattctagaaa

SEQ ID NO: 1248 - DNA, 174 bp, synthetic construct
  misc_feature 1..174: note = Description of Artificial Sequence: Synthetic polynucleotide
  source 1..174: mol_type = other DNA
catccgtaatacaacccggaataacctccaaaccgagaagaactagtctatgaccagacgaaaaggaactagtccctgttcttttcttagggcctttttcacctgggtaaagtgtagttattgcgtataactctggtatcaataccacccggaagaaattatttatctgccatc

SEQ ID NO: 1249 - DNA, 408 bp, synthetic construct
  misc_feature 1..408: note = Description of Artificial Sequence: Synthetic polynucleotide
  source 1..408: mol_type = other DNA
ccttcatcaagacaccaggtctttcctccttaaggctagccccggcgtgtgaattcacgttgggcaactagtggtgtcactgtgcgctcccaatctcggccgcggagtgctgttccccaagccaaacccctggcccttcactatgtgcctggcaagcatatctgagaaggtgttccgctgtggctgccaacctggtgacaggtgccccagtgtgcgtaaccttcttccgtctccggacggtagtgattggttaagatttggtgtaaggttcatgtgccaacgccctgtgcgggatgaaacctctactgccctaggaatgccaggcaggtaccccacctccgggtgggatctgagcctgggctaattgtctacgggtagtttcatttccaatccttttatgtcggagtc

SEQ ID NO: 1250 - DNA, 174 bp, synthetic construct
  misc_feature 1..174: note = Description of Artificial Sequence: Synthetic polynucleotide
  source 1..174: mol_type = other DNA
aaaaactggctccttcctctgcacctggcctgggccacacccaagtgctgtggactggcccgaggggccctgcacgtggccctgagcacctctcagcgtagcctgcctagtccctagacccctagccagctccaaggggaggcacctccaagcaggccaggctacctcgggggt

SEQ ID NO: 1251 - DNA, 174 bp, synthetic construct
  misc_feature 1..174: note = Description of Artificial Sequence: Synthetic polynucleotide
  source 1..174: mol_type = other DNA
aaaaatcacttacttgaaatctgaaagtatgtctctggtgtagttgttcagcagcacctcgttaccctcctcccagctctggtattccagtccccggcgggcggcgaacttcctccacaccttgaaagggatgtcaaattcctggtccacaattttcattgtcttccctctcag

SEQ ID NO: 1252 - DNA, 174 bp, synthetic construct
  misc_feature 1..174: note = Description of Artificial Sequence: Synthetic polynucleotide
  source 1..174: mol_type = other DNA
tcccagcaaagagaacattgtggcattttccattgcttattgcttggtaacatgcatcatcactgctatcatttgtgtgtgcatacacttgcttatagttattcgccctagacaaagcaataaggaaaaagagaaaatgccttaacctttttactcataccttttctttacagc

SEQ ID NO: 1253 - DNA, 174 bp, synthetic construct
  misc_feature 1..174: note = Description of Artificial Sequence: Synthetic polynucleotide
  source 1..174: mol_type = other DNA
gatcccatggatgagcccaccctgctttatcttcttttcgaagtcttcgacgtggtcagagtgcaccagccacaccgcggcgtcatcgaggccgtctacctgcgcacaccgttctcggccggcaacgccaccacataagaagcctcttgcttcttgcaagcagcagctgcagcc

SEQ ID NO: 1254 - DNA, 174 bp, synthetic construct
  misc_feature 1..174: note = Description of Artificial Sequence: Synthetic polynucleotide
  source 1..174: mol_type = other DNA
ctacaaatattaatgtaggccctgacctttcacctcctgagtctccgccctttattagtacacgtcctgtatcaccttcttttgactctgttatggtattaggatgggattttatattgcatcccagttatatgtggcgtaagcgccgtaaacctgtaccatatttttttgcag

SEQ ID NO: 1255 - DNA, 174 bp, synthetic construct
  misc_feature 1..174: note = Description of Artificial Sequence: Synthetic polynucleotide
  source 1..174: mol_type = other DNA
ggtggctttttgccagctcttatacccatcatcgccgcagcgatcggggcgataccaggcatagcttcagtggcggttcaggcctcgcagcgccactaacattggaaaaaacttataaataaaaaatagaatggactctgacgctcctggtcctgtgactatgtttttgtagag

SEQ ID NO: 1256 - DNA, 174 bp, synthetic construct
  misc_feature 1..174: note = Description of Artificial Sequence: Synthetic polynucleotide
  source 1..174: mol_type = other DNA
ctgcaagtcgcactcgccgtcgccgccgccgcaacactgccagcaaattgactcccgccgccctggtgcggagagtgtaccgcgatggtcgcgctgaacctctgacgctgccgcgcgcgcgctaccatccaagcatcaccacttaatgactgttgacgctgcctccttgcagat

SEQ ID NO: 1257 - DNA, 174 bp, synthetic construct
  misc_feature 1..174: note = Description of Artificial Sequence: Synthetic polynucleotide
  source 1..174: mol_type = other DNA
gaggagttcaggtagatattgaaagatgagccttctaaccgaggtcgaaacgtatgttctctctatcgttccatcaggccccctcaaagccgagatcgcgcagagacttgaagatgtctttgctgggaaaaacacagatcttgaggctctcatggaatggctaaagacaagacc

SEQ ID NO: 1258 - DNA, 174 bp, synthetic construct
  misc_feature 1..174: note = Description of Artificial Sequence: Synthetic polynucleotide
  source 1..174: mol_type = other DNA
agaagccgccccattcctagaggtgccgatgaattctgggaaggaacatacattctcgtagttgcattcgtgctcgcatttctcgtttactccgattttcttagtaatttaagtccgtttggagaaattttatcttcgccttgtatttcaacgtgaatcttcgtcgtgaagagg

SEQ ID NO: 1259 - DNA, 174 bp, synthetic construct
  misc_feature 1..174: note = Description of Artificial Sequence: Synthetic polynucleotide
  source 1..174: mol_type = other DNA
gtgctggtgaagctgggcgattgtctactgacttttttgcgtgtgggatttgccagactttttgcggactgcggttatgagaagattggaaaaatatccatgcgcttcggacggatgtcgacgttgggcatgtcggagacttatcaatcgtgcatgagcctcagtaagtagttc

SEQ ID NO: 1260 - DNA, 174 bp, synthetic construct
  misc_feature 1..174: note = Description of Artificial Sequence: Synthetic polynucleotide
  source 1..174: mol_type = other DNA
atgcggtttttacgaactcaactttcaataagattcctttgacgacgataagtcggctttttgttcagttgattataggaggacacgctaaaggaacgatttatgacagcaatgtaattcgcgtcagtcgtcggaaacgagaagacagtttactaaaaaagatgagattggagt

SEQ ID NO: 1261 - DNA, 174 bp, synthetic construct
  misc_feature 1..174: note = Description of Artificial Sequence: Synthetic polynucleotide
  source 1..174: mol_type = other DNA
gcttgaaacgccccaggaactaggcgcagctgtgcttagtcatgtgtaaataaagttgtacaataaaagtatgtgtgacgcatgcaaggtgtggtttatgactcatgggcggggcttagtcctatataagtggtaacacctgggcacttaggcacaaactttaggaagttccta

SEQ ID NO: 1262 - DNA, 174 bp, synthetic construct
  misc_feature 1..174: note = Description of Artificial Sequence: Synthetic polynucleotide
  source 1..174: mol_type = other DNA
caattctgggatggaaccgactactttgggtgtccgtgtttcctgtttcacttaccttggctgcttatggtgacaattgtatagttgtcatcatatagctattggattggccatccggatattattcttgtgtttatttgtgtaatttgatataatttagaaccctgtataaga

SEQ ID NO: 1263 - DNA, 245 bp, synthetic construct
  misc_feature 1..245: note = Description of Artificial Sequence: Synthetic polynucleotide
  source 1..245: mol_type = other DNA
tccagtataaatagtagctaggcgggataatgagtcgctgtttgcacattatcaaagctacgcattagataactgcagaaagacgctgcgtatagttatgtattcttagaatacgtctgtatatacgcacgaacatataagtctgtaagaatgtaatgcttcgtacagatcactgtttattgaagttcaacggtatgaaatttgagtatacctagaattagcaggaataattggcatctcaattt

SEQ ID NO: 1264 - DNA, 174 bp, synthetic construct
  misc_feature 1..174: note = Description of Artificial Sequence: Synthetic polynucleotide
  source 1..174: mol_type = other DNA
ggctcgctccctgtagccggagggttattttccaagggttgagtcgcaggacccccggttcgagtctcgggccggccggactgcggcgaacgggggtttgcctccccgtcatgcaagaccccgcttgcaaattcctccggaaacagggacgagccccttttttgcttttcccag

SEQ ID NO: 1265 - DNA, 174 bp, synthetic construct
  misc_feature 1..174: note = Description of Artificial Sequence: Synthetic polynucleotide
  source 1..174: mol_type = other DNA
tgaatcatgtaaatatggacaatcaaggccatacagcggccgaaagacattggggtccaatctcagccgatccaaaacctatggtcatgtggaaagaccttctcacagggtcctggaaaggacccgatgtcctaataacagccggacgaggctatgcttgtgtttttccacagg

SEQ ID NO: 1266 - DNA, 174 bp, synthetic construct
  misc_feature 1..174: note = Description of Artificial Sequence: Synthetic polynucleotide
  source 1..174: mol_type = other DNA
caacccaatcgaaggtctcccgccccggaatcccccattgccattttacccaagtagccttattcatagatgtaaacgtttgggtgtgtgttttgttgtgcagggttcgtccgattcataacgcgacagcgtcgagtcggttttaagggaaaaggttactacggccccaaggac

SEQ ID NO: 1267 - DNA, 174 bp, synthetic construct
  misc_feature 1..174: note = Description of Artificial Sequence: Synthetic polynucleotide
  source 1..174: mol_type = other DNA
tcggtctcctcctggcctgcgtcttgctcgtgctcctgttcatcctgtgggggttctagacgagccggctcttcgaagcccaggtcctgctcgattttgggttgctcgtgggtggttaagtcctcctcctgctcctgcttacgcggctgctcctccatcttcccctaggaaaca

SEQ ID NO: 1268 - DNA, 174 bp, synthetic construct
  misc_feature 1..174: note = Description of Artificial Sequence: Synthetic polynucleotide
  source 1..174: mol_type = other DNA
agcctgacaacgaaaggatctcttacaaagttatagctccgtgcggttgcaggaactgtgaggtcaagcttcgcatttttgtccacgccacagaatttggtattagagctttccaacagctactgaccggagatctgcagctcctgtgccctgactgtcgcggaaactgcaaac

SEQ ID NO: 1269 - DNA, 174 bp, synthetic construct
  misc_feature 1..174: note = Description of Artificial Sequence: Synthetic polynucleotide
  source 1..174: mol_type = other DNA
gggctgatacagggaagaatttgaaaagttattggacgatagtccgggactttttgaagctcttaacttgggtcatcaggctcattttaaggagaaggttttatcagttttagatttttctactcctggtagaactgctgctgctgtagcttttcttacttttatattggataa

SEQ ID NO: 1270 - DNA, 174 bp, synthetic construct
  misc_feature 1..174: note = Description of Artificial Sequence: Synthetic polynucleotide
  source 1..174: mol_type = other DNA
tttgaagaaaatgcagcttgtggggtggatttaccccttagaaggccttctttaggtgcttgtggtggaattttacaaagtataaccgggatgttttcccatgggtaagaaaacagcttttaaagcagtaccggtttatattcacgccagttgactttgtttgctgcagacacc

SEQ ID NO: 1271 - DNA, 174 bp, synthetic construct
  misc_feature 1..174: note = Description of Artificial Sequence: Synthetic polynucleotide
  source 1..174: mol_type = other DNA
ttggcaaatttgcttctcactttacattacgtagtcacgatatttcccatagtaataattttggtgttgtaactagttttactacttatggtaatactgtttctgaggctgtgtctagattagttgaatcagcttctgaatttattgtttggcgtgcagaggcacttaataagt

SEQ ID NO: 1272 - DNA, 174 bp, synthetic construct
  misc_feature 1..174: note = Description of Artificial Sequence: Synthetic polynucleotide
  source 1..174: mol_type = other DNA
agaagactatagagaggaatttgaaaacatattggccgactgtccagggcttttggcttcactagacctttgttaccacttggtgtttcaggaaaaagtggtcagatccttagatttttcatctgtgggacgaacggttgcttctattgcttttttggcaaccatattggataa

SEQ ID NO: 1273 - DNA, 174 bp, synthetic construct
  misc_feature 1..174: note = Description of Artificial Sequence: Synthetic polynucleotide
  source 1..174: mol_type = other DNA
atggattccatgtgtcttatcctgagagtagagcgtatccagaagttattcctacagaaccagataataccccaacagtaataattcacacagaagattttagtggtgattattatctacatcctagcttaaaatggaagaaacgaaaacgggcctatttataattttttgcag

SEQ ID NO: 1274 - DNA, 174 bp, synthetic construct
  misc_feature 1..174: note = Description of Artificial Sequence: Synthetic polynucleotide
  source 1..174: mol_type = other DNA
agagtttacccctgctcttgttcccggggggcttctggctaagcagtttggtgataatatgagagagtttttacaactagaacttaaagaagaacttagagccaagggcatgtcaattgatgttgccattctcaattcgctacaggtgacacaggagcaagatattttgtcatt

SEQ ID NO: 1275 - DNA, 174 bp, synthetic construct
  misc_feature 1..174: note = Description of Artificial Sequence: Synthetic polynucleotide
  source 1..174: mol_type = other DNA
ttttcctaggatttggctccatggcttagggcaacatatctatgaaacttatggggatacttgggcaggagtggaagccataataagaattctgcaacaactgctgtttatccattttcagaattgggtgtcgacatagcagaataggcgttactcgacagaggagagcaagaa

SEQ ID NO: 1276 - DNA, 174 bp, synthetic construct
  misc_feature 1..174: note = Description of Artificial Sequence: Synthetic polynucleotide
  source 1..174: mol_type = other DNA
gtgcagttttggatagtgaaggatgccctgacggtacccataggtaacaagtgacactatggatctaagcaggggctcactctacgctgctttacagctggctgtgagttaaaaaacgtctagctatccacaacctaggggactaggttttccttttatttagattacaattat

SEQ ID NO: 1277 - DNA, 174 bp, synthetic construct
  misc_feature 1..174: note = Description of Artificial Sequence: Synthetic polynucleotide
  source 1..174: mol_type = other DNA
tgcgtcgacctccttatcttctagggtagaggtggtggcaggactgggcggtggaatgcttaagctctgctccttttcctcgtcgctgaggacgagatgtgatggcactcgtggcgatgttgacagcaatggctgagtttccatgtctgttgtttctctgcctaggagaacaca

SEQ ID NO: 1278 - DNA, 174 bp, synthetic construct
  misc_feature 1..174: note = Description of Artificial Sequence: Synthetic polynucleotide
  source 1..174: mol_type = other DNA
gccaggaacagccccctctgggctgtcaggagtgggtggctaggtgggaggtcgcagtcgaccccgatggtgttcagtagatgcaccacatcccccacttcgggatagtgtttcaggtaaagctcatggaggaaagattttaatggtcgggcatttcctctgttactactagcc

SEQ ID NO: 1279 - DNA, 174 bp, synthetic construct
  misc_feature 1..174: note = Description of Artificial Sequence: Synthetic polynucleotide
  source 1..174: mol_type = other DNA
ccagcagcgcgcacgacgcgatcacggtaacccccatgactagacccacgcagatagccagccccgctagcgtatccagcgccatcccgttcgctcccgtcgtcgtctcctgaacaaagcaacaactccgcagtccccgttttcaaccgtttttgtttccttctccgcgagcaa

SEQ ID NO: 1280 - DNA, 174 bp, synthetic construct
  misc_feature 1..174: note = Description of Artificial Sequence: Synthetic polynucleotide
  source 1..174: mol_type = other DNA
taaattttttaactttagacacagaaggcaattcagcagcccagcgtttttggggagaacgatcctcatgcaaaaaaccacttgtgcgatggaaggatccacttaccaatctgtggtatgggccagaccctgtattaatatggggacgagggcatgtttgtgtttttccacagg

SEQ ID NO: 1281 - DNA, 174 bp, synthetic construct
  misc_feature 1..174: note = Description of Artificial Sequence: Synthetic polynucleotide
  source 1..174: mol_type = other DNA
cctaccttgacattggctggaaacgaatagatgccatgaaccacccaactttccccgcgcccgctatgcttccactgcaacaagttgttgccggcggctttgtcccagccaatcagcctcgccccacttctcccacccccactgaaatcagctactttaatctaacaggaggag

SEQ ID NO: 1282 - DNA, 174 bp, synthetic construct
  misc_feature 1..174: note = Description of Artificial Sequence: Synthetic polynucleotide
  source 1..174: mol_type = other DNA
atgagaggtatagatttttggttagcagaattaaaatatttgaatttaagaataaatttccttttaatgaagatggtacccctatgtttgaacttactgaccaaagctggaaatctttttttcaaaggctttggaagcagttagatctaagtgaccaagaagacgagggggagg

SEQ ID NO: 1283 - DNA, 174 bp, synthetic construct
  misc_feature 1..174: note = Description of Artificial Sequence: Synthetic polynucleotide
  source 1..174: mol_type = other DNA
agcaaaagcaggggataattctattaaccatgaagactatcattgctttgagctacattctatgtctggttttcgctcaaaaacttcccggaaatgacaacagcacggcaacgctgtgccttgggcaccatgcagtaccaaacggaacgatagtgaaaacaatcacgaatgacc

SEQ ID NO: 1284 - DNA, 174 bp, synthetic construct
  misc_feature 1..174: note = Description of Artificial Sequence: Synthetic polynucleotide
  source 1..174: mol_type = other DNA
ataagttgtgtgcagacatcctaatacatagcacttatttctcttgctttacggcaggtgaagtaagaagagccatcagaggggaaaagttattgtcctgctgcaactatccccaagctcataaagcacaggtaccatcacttcaatacctagccctagtagtagtacaacaaa

SEQ ID NO: 1285 - DNA, 174 bp, synthetic construct
  misc_feature 1..174: note = Description of Artificial Sequence: Synthetic polynucleotide
  source 1..174: mol_type = other DNA
ccttttcacgcacttcagagcaggatgtggccactcaagaattggccagacaaggggaggaaatcctctctcagctataccgacccctagaaacatgcaataactcatgctattgtaagcgatgctgctaccattgtcagatgtgttttctaaacaaggggctcgggatatgtt

SEQ ID NO: 1286 - DNA, 144 bp, synthetic construct
  misc_feature 1..144: note = Description of Artificial Sequence: Synthetic polynucleotide
  source 1..144: mol_type = other DNA
gagcgtttgggagagctgattctgcagcccagagagtagtctcagggcatcctctggagcctgacctgtgatcgtcgcatcatagaccgccagtagacctgggagcagattcaccgccgcggccgtctcctttaagtgtgaatc

SEQ ID NO: 1287 - DNA, 232 bp, synthetic construct
  misc_feature 1..232: note = Description of Artificial Sequence: Synthetic polynucleotide
  source 1..232: mol_type = other DNA
cgcggcagactccttttcccgccaagaacttatagaccaggagaaagaactccttgagaagttggcgtggcgaacagaggcagtcttagcgacggacgtcacttccttcttgttacttaaattgctggggggctcccaacacctggacttttggcaccacgaggtcaacaccctgattacaaaagccttagttgacccaaagactggctcattgcccgcctctattatcagc

SEQ ID NO: 1288 - DNA, 219 bp, synthetic construct
  misc_feature 1..219: note = Description of Artificial Sequence: Synthetic polynucleotide
  source 1..219: mol_type = other DNA
atataatacttgagatgcactgtttcatggttacccatcatttgaggaaatttccaataaacttgaatgtaaggcttgaaacagtggtctaggtgccctatttagggtgaggagcctagctggcagccccagtgaatcctctattggatagaaaccgctatatcgggtagctatagcagtcggatagtaatatatccggcgtttcgaaataccatacct

SEQ ID NO: 1289 - DNA, 177 bp, synthetic construct
  misc_feature 1..177: note = Description of Artificial Sequence: Synthetic polynucleotide
  source 1..177: mol_type = other DNA
gatctgattagaagtaagaaaattcctagttataatatttttaatactgctacatttttaagacccttagttatttagctttaccgcccaggatggggtgcagcgttcctgcaatatccagggcacctaggtgcagccttgtagttttagtggactttaggctaaagaatttcacta

SEQ ID NO: 1290 - DNA, 148 bp, synthetic construct; identical to SEQ ID NO: 1169
  misc_feature 1..148: note = Description of Artificial Sequence: Synthetic polynucleotide
  source 1..148: mol_type = other DNA

SEQ ID NO: 1291 - DNA, 116 bp, synthetic construct
  misc_feature 1..116: note = Description of Artificial Sequence: Synthetic polynucleotide
  source 1..116: mol_type = other DNA
ctctctctcactggtcctcctactttgtcatctgattcctgaaatcaaaccgattcacacatcctacaacacacacgactcatcgaagcagcaacacataagcatcaacactggaa

SEQ ID NO: 1292 - DNA, 113 bp, synthetic construct
  misc_feature 1..113: note = Description of Artificial Sequence: Synthetic polynucleotide
  source 1..113: mol_type = other DNA
ctctctaagcgacagcgacgcaacaggaaaacggaagaaaggcggagagaaaagtgcgaagaagagattggtagctagccacgcggctagctctgttttaaacaagaaaagaa

SEQ ID NO: 1293 - DNA, 742 bp, synthetic construct
  misc_feature 1..742: note = Description of Artificial Sequence: Synthetic polynucleotide
  source 1..742: mol_type = other DNA
ttaaaacagctctggggttgtacccaccccagaggcccacgtggcggctagtactccggtattgcggtacccttgtacgcctgttttatactcccttcccgtaacttagacgcacaaaaccaagttcaatagaagggggtacaaaccagtaccaccacgaacaagcacttctgtttccccggtgatgtcgtatagactgcttgcgtggttgaaagcgacggatccgttatccgcttatgtacttcgagaagcccagtaccacctcggaatcttcgatgcgttgcgctcagcactcaaccccagagtgtagcttaggctgatgagtctggacatccctcaccggtgacggtggtccaggctgcgttggcggcctacctatggctaacgccatgggacgctagttgtgaacaaggtgtgaagagcctattgagctacataagaatcctccggcccctgaatgcggctaatcccaacctcggagcaggtggtcacaaaccagtgattggcctgtcgtaacgcgcaagtccgtggcggaaccgactactttgggtgtccgtgtttccttttattttattgtggctgcttatggtgacaatcacagattgttatcataaagcgaattggattggccatccggtgaaagtgagattcattatctatctgtttgctggattcgctccattgagtgtgtttactctaagtacaatttcaacagttatttcaatcagacaattgtatcata

SEQ ID NO: 1294 - DNA, 574 bp, synthetic construct
  misc_feature 1..574: note = Description of Artificial Sequence: Synthetic polynucleotide
  source 1..574: mol_type = other DNA
cccccccccccccccccccccccccccccctctccctcccccccccctaacgttactggccgaagccgcttggaataaggccggtgtgcgtttgtctatatgttattttccaccatattgccgtcttttggcaatgtgagggcccggaaacctggccctgtcttcttgacgagcattcctaggggtctttcccctctcgccaaaggaatgcaaggtctgttgaatgtcgtgaaggaagcagttcctctggaagcttcttgaagacaaacaacgtctgtagcgaccctttgcaggcagcggaaccccccacctggcgacaggtgcctctgcggccaaaagccacgtgtataagatacacctgcaaaggcggcacaaccccagtgccacgttgtgagttggatagttgtggaaagagtcaaatggctctcctcaagcgtattcaacaaggggctgaaggatgcccagaaggtaccccattgtatgggatctgatctggggcctcggtgcacatgctttacgtgtgtttagtcgaggttaaaaaacgtctaggccccccgaaccacggggacgtggt

SEQ ID NO: 1295 - DNA, 721 bp, synthetic construct
  misc_feature 1..721: note = Description of Artificial Sequence: Synthetic polynucleotide
  source 1..721: mol_type = other DNA
tttgaaatggggggctgggccctgatgcccagtccttcctttccccttccggggggttaaccggctgtgtttgctagaggcacagaggggcaacatccaacctgcttttgcggggaacggtgcggctccgattcctgcgtcgccaaaggtgttagcgcacccaaacggcgcacctaccaatgttattggtgtggtctgcgagttctagcctactcgtttctcccccgaccattcactcacccacgaaaagtgtgttgtaaccataagatttaacccccgcacgggatgtgcgataaccgtaagactggctcaagcgcggaaagcgctgtaaccacatgctgttagtccctttatggctgcaagatggctacccacctcggatcactgaactggagctcgaccctccttagtaagggaaccgagaggccttcgtgcaacaagctccgacacagagtccacgtgactgctaccaccatgagtacatggttctcccctctcgacccaggacttctttttgaatatccacggctcgatccagagggtggggcatgacccctagcatagcgagctacagcgggaactgtagctaggccttagcgtgccttggatactgcctgatagggcgacggcctagtcgtgtcggttctataggtagcacatacaaatatgcagaactctcatttttctttcgatacagcctctggcacctttgaagatgtaa

SEQ ID NO: 1296 - DNA, 421 bp, synthetic construct
  misc_feature 1..421: note = Description of Artificial Sequence: Synthetic polynucleotide
  source 1..421: mol_type = other DNA
atgggcgcgagaaactccgtcttgagagggaaaaaagcagatgaattagaaagaatcaggttacggcccggcggaaagaaaaagtacaggctaaaacatattgtgtgggcagcgaataaattggacagattcggattagcagagagcctgttggagtcaaaagagggttgtcaaaaaattcttacagttttagatccaatggtaccgacaggttcagaaaatttaaaaagtctttttaatactgtctgcgtcatttggtgcatacacgcagaagagaaagtgaaagatactgaaggagcaaaacaaatagtgcggagacatctagtggcagaaacaggaactgcagagaaaatgccaagcacaagtagaccaacagcaccatctagcgagaagggaggaaattacccagtgcaacatgtag

SEQ ID NO: 1297 - DNA, 127 bp, synthetic construct
  misc_feature 1..127: note = Description of Artificial Sequence: Synthetic polynucleotide
  source 1..127: mol_type = other DNA
cagttcccgcctccgtctgaatttttgctttcggtttgggaccgaagccgcgccgcgcgtcttgtctgctgcagcatcgttctgtgttgtctctgtctgactgtgtttctgtatttgtctgagaata

SEQ ID NO: 1298 - DNA, 311 bp, synthetic construct
  misc_feature 1..311: note = Description of Artificial Sequence: Synthetic polynucleotide
  source 1..311: mol_type = other DNA
gcaacagtcctaacattcacctctcgtgtgtttgtgtctgttcgccatcccgtctccgctcgtcacttatccttcactttccagagggtccccccgcagaccccggtgaccctcaggtcggccgactgcggcagctggcgcccgaacagggaccctcggataagtgacccttgtctctatttctactattttgtgttcgtcttgttttgtctctatcttatctggctattatcacaagagcggaacggactcaccacagggaactgcagtctcgcctacagagaagaggtaggttacggtgagccattgga

SEQ ID NO: 1299 - DNA, 663 bp, synthetic construct
  misc_feature 1..663: note = Description of Artificial Sequence: Synthetic polynucleotide
  source 1..663: mol_type = other DNA
gtacagttgtatagcagcacacgccttccctctttttcaccgcagctaagagagagaaagagagtatgtcagtcaagggcgtggagatgccagaaatgacgtgggacttggacgttggaaataaatggcggcgtcgaaaggccctgagtcgcattcaccggttctgggaatgtcgactacgggtgtggtggctgagtgacgccggcgtaagagaaaccgacccaccgcgtccccgacgccgcccgacttggatgaccgcggtgtttcacgttatctgtgccgttttgcttacgcttatgattatggccatcggcgcgctcatcgcgtacttaagatattaccaccaggacagttggcgagacatgctccacgatctattttgcggctgtcattatcctgagaagtgccgtcggcaccacgagcggcagagaagcagacggcgagccatggatgtgcccgacccggaactcggcgacccggcccgccggccgttgaacggggccatgtactacggcagcggctgtcgcttcgacacggtggaaatggtggacgagacgagacccgcgccgccggcgctgtcatcgcccgaaaccggcgacgatagcaacgacgacgcggttgccggcggaggtgctggcggggtaacatcatccgcgactcgta

SEQ ID NO: 1300 - DNA, 161 bp, synthetic construct
  misc_feature 1..161: note = Description of Artificial Sequence: Synthetic polynucleotide
  source 1..161: mol_type = other DNA
ttttcaaaagttctctcctagaacttttcccacctctttcttgtcacttttgctagtttctctctgtttttctccattcttactagttggtgttgttcggttgtttggcttccctgctctttttccttccttccttcgcttttgttttggtttgctttacc

SEQ ID NO: 1301 - DNA, 101 bp, synthetic construct
  misc_feature 1..101: note = Description of Artificial Sequence: Synthetic polynucleotide
  source 1..101: mol_type = other DNA
tagcttgtttgggttctttatcactgtcctgattaaggctgaatcagaacactttcacttccacacacacgacagtagtaagacacaaaatatagtagtta

SEQ ID NO: 1302 - DNA, 153 bp, synthetic construct
  misc_feature 1..153: note = Description of Artificial Sequence: Synthetic polynucleotide
  source 1..153: mol_type = other DNA
actgggctgatgattatgactccgatgaggattacggtctggagagagaggctgcaacaaatgcgcccgcagagaaaactgctcaaacaaactcagcagagaagactgctccatcaacttcagcagagaaaactgctccaacaaacaagcctt

SEQ ID NO: 1303 - DNA, 143 bp, synthetic construct
  misc_feature 1..143: note = Description of Artificial Sequence: Synthetic polynucleotide
  source 1..143: mol_type = other DNA
aaataacaaatctcaacacaacatatacaaaacaaacgaatctcaagcaatcaagcattctacttctattgcagcaatttaaatcatttcttttaaagcaaaagcaattttctgaaaattttcaccatttacgaacgatagca

SEQ ID NO: 1304 - DNA, 449 bp, synthetic construct
  misc_feature 1..449: note = Description of Artificial Sequence: Synthetic polynucleotide
  source 1..449: mol_type = other DNA
gcgaattcaaacgagatgcctaagagtttggattcgctagctgtccggatggtagtgttacctgtggtccaccacggtaaagcattaagggctagccttaacctcactggaattgaatgaaagtgggagatcagtggcctccaacggttggactgactggacggggggtaatcgagtgggagtcccccacatcctacatttatgtagttcctcacgatccacagcaatcgtctggttgtatccaggttactgccgcgagcgtaagggagtgttttggcagacacaatccaatatgctgactacggtcggtgtggaggatccgaaacgtaagcaagtttcttgttactattgatcaacagctacatcctacaacgacagctatcataccagccatctttaacccaagaattccacgtgaacataccttgagtatacaattcttgagcaaa

SEQ ID NO: 1305 - DNA, 297 bp, synthetic construct
  misc_feature 1..297: note = Description of Artificial Sequence: Synthetic polynucleotide
  source 1..297: mol_type = other DNA
accatcaacactccaggctcatggattaagttaggttccgccgaagcgggctaaccaggcccctagtaggaggcgcctatcccatgagccctttccccacagattgagtggagctggagctgggaaggaccgagtacggtccaatcgagaagaaccctgatgaacattccaggcctcttcggtagatttgggtatacccaccagtgaaggcggggtcgtgggcacaggccccctagtccacacagcctgatagggtcctgccgcaggatctgtgggtgcggctgtacatgtaacatg

SEQ ID NO: 1306 - DNA, 739 bp, synthetic construct
  misc_feature 1..739: note = Description of Artificial Sequence: Synthetic polynucleotide
  source 1..739: mol_type = other DNA
aaaattaaagatcatattacataaaataacataatataaaatcacttaaaatcatgtgttttaaactacgcttagtttaattagttttggtgcgtttagcgattcgtcattgtacatggtgtgttgtgtgttttatgattttagtatgtttcttaaattattgaagccctataaggaccggctataaacgtcctgttttcaagtgggaaaagaaaccactcgccttaccactagctgggatctagctagagctccggcgtaaaacgagctacgcttttggatgcagcgttacgcattcctgggcttaggcgattgtactacaatgggtagcccccagtgccagtttttggcccgctattgtattacaattcggttaagttaacttggttggaaacaagccaaatgctagctatcattcgcattcggacatgaggaaggtgaacgcagtgaatcatagtggtggtacgctcttggggtggttcccaagacttcgtagggctatggttagctgttagtaagacctaatgttcgtttgtgatacagtcgaaagttgtttccgtatggagctcggtctgcgcgttaagcaccagcctgactatgggcagtatccctgtttttccactattctcactatcaaccacaacgcacgactttctgctctcttggcactttcttactttcacactctcgcgctcgtttcaaagttttattacttctctttttctcctgaccattcacg

SEQ ID NO: 1307 - DNA, 182 bp, synthetic construct
  misc_feature 1..182: note = Description of Artificial Sequence: Synthetic polynucleotide
  source 1..182: mol_type = other DNA
gaaagttccacccctttccctttcattcacgactgactgccggcttggcccacggccaagtaccggcgactccgttggctcggagccagcgacagcccatcctatagcactctccaggagagaaacttagtacacagttgggggctcgtccgggatacgagcgcccctttattccctaggca

SEQ ID NO: 1308 - DNA, 310 bp, synthetic construct
  misc_feature 1..310: note = Description of Artificial Sequence: Synthetic polynucleotide
  source 1..310: mol_type = other DNA
caacagtcctaacattcacctctcgtgtgtttgtgtctgttcgccatcccgtctccgctcgtcacttatccttcactttccagagggtccccccgcagaccccggtgaccctcaggtcagccgactgcggcagctggcgcccgaacagggccctcggataagtgacccttgtctctatttctactatttggtgttcgtcttgtattgtctctttcttgtctggctatcatcacaagagcggaacggactcaccatagggagctgcagtcccgcctacggagaagaggtaggttatggtgagccattggat

SEQ ID NO: 1309 - DNA, 120 bp, synthetic construct
  misc_feature 1..120: note = Description of Artificial Sequence: Synthetic polynucleotide
  source 1..120: mol_type = other DNA
gagaattagataaatgggaaaaaattcggttaaggccagggggaaagaaacaatataaactaaaacatatagtatgggcaagcagggagctagaacgattcgcagttaatcctggccttt

SEQ ID NO: 1310 - DNA, 122 bp, synthetic construct
  misc_feature 1..122: note = Description of Artificial Sequence: Synthetic polynucleotide
  source 1..122: mol_type = other DNA
gaagccttagataagatagaggaagagcaaaacaaaagtaagaaaaaggcacagcaagcagcagctgacacaggaaacaacagccaggtcagccaaaattaccctatagtgcagaacctcca

SEQ ID NO: 1311 - DNA, 119 bp, synthetic construct
  misc_feature 1..119: note = Description of Artificial Sequence: Synthetic polynucleotide
  source 1..119: mol_type = other DNA
ggaaagagagtttcaacgttagtggtaacccacgagcggagagctcttacggaggagctctccgtcgatggcgaaagccctttctaacaaacaaccaacaattcttatctacatgaatc

SEQ ID NO: 1312 - DNA, 389 bp, synthetic construct
  misc_feature 1..389: note = Description of Artificial Sequence: Synthetic polynucleotide
  source 1..389: mol_type = other DNA
acctccgtgctatgcacggtgcgttgtcagcgttttgcgcttgcatgcgctacacgcgtcgtccaacgcggagggattcttccacattaccatgtgtcactccccctatggagggttccaccccgcccacacggaaataggttaaccatacctatagtacgggtgagcgggtcctcctagggcccccccggcaggtcgagggagctgaaattcgtgaatccgtgagtacacggaaatcgcggcttgaacgtcatacgtgaccttcggagccgaaatttgggcgtgccccacgaaggaaggcgggggcggtgttgggccgccgccccctttatcccacggtctgataggatgcttgcgagggcacctgccggtctcgtagaccataggac

SEQ ID NO: 1313 - DNA, 372 bp, synthetic construct
  misc_feature 1..372: note = Description of Artificial Sequence: Synthetic polynucleotide
  source 1..372: mol_type = other DNA
tgaaaactagcccacctgcaaccaccaatcgggctaggatcacgaagaaccagggctgccccccgcaactgcgcggcgggtttccgcgaacgtttatctgttggtattctagtgtggaccggttaggcgccggtaaacaatttccatcacacttgattccttgtcgggaatctagatcgccgccccaccgtatggtggatcccgggtcgaaggtgaggtgtattttgtggtaggggagggtggtcacctgttggtggctccgttgatcctaccctgagtacgctccgacggaaattgcttacattcgacaaaatcgcctgcaaccgaaacttcccacaccgaaccaaccaaggccagtctccgccacttgcc

SEQ ID NO: 1314 - DNA, 289 bp, synthetic construct
  misc_feature 1..289: note = Description of Artificial Sequence: Synthetic polynucleotide
  source 1..289: mol_type = other DNA
gaaatttagggcacacacgaactctcagttcttgcccgcacggtagtccgatgcctacgctcccctgggggctatcgaggcggcaacatgggtgtgttttcggtgttcaagaagagcctgtcgtctcccaagcgactagggttgcctcgcactgtatagtgtagttcgcgacccgaagagcaagggtggtgttggttggcgagggggggcttcggccttccgttgacccaactgatatcacacttatcttcttgactcaacggatttgaaaaacgaaccctaaatttcc

SEQ ID NO: 1315 - DNA, 293 bp, synthetic construct
  misc_feature 1..293: note = Description of Artificial Sequence: Synthetic polynucleotide
  source 1..293: mol_type = other DNA
gataaaaacaaaaaatccctaggcatggcaagaaaactaagaacaatgcagtttgaatagatttaaaaacaattaatttgtttaatttaatttaacatttgaactgtctggcacagttagactgtcgagccgtctgatgagtagcacctcagggtcacgaaacgctggacgtaacggcggaacagattattgaggttagtagaacactttcagaacacaacaacacaacaaacaaatacaacacaacaacacaacacaacaacacaacacaacaacactgtcaaacaaacaag

SEQ ID NO: 1316 - DNA, 215 bp, synthetic construct
  misc_feature 1..215: note = Description of Artificial Sequence: Synthetic polynucleotide
  source 1..215: mol_type = other DNA
caaaagaacgattcaaagcaattgcatccactaaaaccctaccatgcaagccaccccactcacgacaaaccttagaacctaaccacaatgtctcactacgtcagtaacagtgagcagaagtatagtgagcgggaagctactttcatcgcgattcggggtgcagccaacgctgtgatcaatgcgagggcagaggctgattcgcttaaggtgtggga

SEQ ID NO: 1317 - DNA, 264 bp, synthetic construct
  misc_feature 1..264: note = Description of Artificial Sequence: Synthetic polynucleotide
  source 1..264: mol_type = other DNA
ccggcagttagtcgtgaatgaaagggaaaggggtggaactttcgatctgtagcggcgcagaacagaaaacgaaacaaagacgcagagttgagcaagcagggtcaggcaaagcgtggagagccggctgagtctaggcaggctccaagggagcgccggacaaaggcccggtctcgacctgagctctgaacttacctagacggcggacgcagttcaggaggcaccacaggcgggaggcggcagaacgcgactcaaccggcgtggatg

SEQ ID NO: 1318 - DNA, 96 bp, synthetic construct
  misc_feature 1..96: note = Description of Artificial Sequence: Synthetic oligonucleotide
  source 1..96: mol_type = other DNA
agttgttagtctacgtggaccgacaaagacagattctttgagggagctaagctcaacgtagttctaacagttttttaattagagagcagatctctg

SEQ ID NO: 1319 - DNA, 107 bp, synthetic construct
  misc_feature 1..107: note = Description of Artificial Sequence: Synthetic polynucleotide
  source 1..107: mol_type = other DNA
agttgttgatctgtgtgaatcagactgcgacagttcgagtttgaagcgaaagctagcaacagtatcaacaggttttattttggatttggaaacgagagtttctggtc

SEQ ID NO: 1320 - DNA, 297 bp, synthetic construct
  misc_feature 1..297: note = Description of Artificial Sequence: Synthetic polynucleotide
  source 1..297: mol_type = other DNA
tctctccaagcccatttacaggcactctacctggtccagcacgaagtctggagaccgttggcggcagcttaccaagaacaactggaccggccggtagtgcctcaccctttccgagtcggtgacacagtgtgggtccgcagacaccaaactaaaaatctagaaccccgctggaaaggaccttataccgtcctactgactacccccaccgctctcaaagtggacggcattgcagcgtggatccacgctgcccacgtaaaggctgccgacaccaggattgagccaccatcggaatcgaca

SEQ ID NO: 1321 - DNA, 311 bp, synthetic construct
  misc_feature 1..311: note = Description of Artificial Sequence: Synthetic polynucleotide
  source 1..311: mol_type = other DNA
tcatatgataaaccctgagctttattgtgtgaccccctgagatttcgattgcgaaaacttgctattttttgaattgcgacgtgtagaaccacttacaaaactttttgaaaggattgtttagctaggattcacgcgttgtacgagcttgcatacaagatgcaagattcctcttgtgaggaccctgggagttcccctcccaaccaaagtgtggcacttccacgagagagtatactctctggggtgctacggaaaaataatgtagcagaatgtgatgtacctaagagtaaatccattctcaaaaataaaacgac

SEQ ID NO: 1322 - DNA, 438 bp, synthetic construct
  misc_feature 1..438: note = Description of Artificial Sequence: Synthetic polynucleotide
  source 1..438: mol_type = other DNA
cccaggagaaaaggcaattgtggtaagtgatgttagtcattggcagttgaaacctgcccaaaacatcctaggtctacgctgtgcgggccgaagtaagtctgggaacaacagggagtatgctgttttctgctttcacccaacacgaccgtacacgaaagagctagaggcatctggaggcaaagggaaaagaatttcttagcccgaatgttcatttgagtccttgacgaatgcgtcccttctgtcccgaaggtgaggcgtatggcgcatgctcatggcattactccaaggtgtatctagaggggggggggccccctctacttagtctagtgctacctgacagggccgcggctggtcgtttgtgtatggtataaccagtagtaatcccccatggattgctttaacccccccttcccccttcacaagacattctctaagatg

SEQ ID NO: 1323 - DNA, 614 bp, synthetic construct
  misc_feature 1..614: note = Description of Artificial Sequence: Synthetic polynucleotide
  source 1..614: mol_type = other DNA
gtttttatgtctacttccacaagggggtggtgctcggcgagcatgttctgtaactgcccttgctagggttcttcacacgagcctcgccttattaaatgtgagttcggcaatgcttacgatctgccgaaacaagtttttatgtctacttccacattcaagcgctttctcatagggattctcattaaagacaagttcggtaacgctttcgattagaaactgttttaggtgcccttatattacaccttacgaggatctccttaaattcgagtccagtaattcctttgagtgacgggaagccttacgagttgcccccccccccccaaaaaaaaaaacaaaaaaaaactgtcttataaggagcatggctaaatgcgacttcggtagtgctttcgacctagcaatctctttttttttttgatttaatctcccttgttaagatatgatgcaataaatacacgacatgaaactttcatttattgacgaattgcaccatttaaactatttgggcgttgttgcacgattatggttatactttacctgcttttgctgcgtagctgttttgtgacgtcaggtttgcaactcctccatcaacgtccccgcgcttccgtctttgtaca

SEQ ID NO: 1324 - DNA, 42 bp, synthetic construct
  misc_feature 1..42: note = Description of Artificial Sequence: Synthetic oligonucleotide
  source 1..42: mol_type = other DNA
ctgcgtctttgtttcgttttctgttctgcgccgctacaaatc

SEQ ID NO: 1325 - DNA, 447 bp, synthetic construct
  misc_feature 1..447: note = Description of Artificial Sequence: Synthetic polynucleotide
  source 1..447: mol_type = other DNA
tgaattcaaacgagatgcctatgagtttggattcgctagctgttgggatggtagcgttacttgtggactactacagtaaagcattaagggctagccttaactccactggaattgatagaaggtggggagatcagtggccttcaacggttgaactgactggacggggggtaatcgagtgggagtcccccacattctgcatttgcagttcctcacgatccacagcgatcgtctgattgtacccaggttactgccgcgagcgtaagggagtgttttggcagacacagtctaagacgctgactacggtcggtgtcaaggatccgaaacgtaagcaagtttcttgttactattgatcaacagctacatcctacaacaacagcaaacatatcgtccatcctcaacccaagaattccacgtgaacataccctgagtatacaattcttggacagg

SEQ ID NO: 1326 - DNA, 495 bp, synthetic construct
  misc_feature 1..495: note = Description of Artificial Sequence: Synthetic polynucleotide
  source 1..495: mol_type = other DNA
gcctatgggtggtctacataggtgagcatgcgttgctcgatatagaccgccattattggtaacacgcttgaagtgttctcatccggagaaagtgatttgctttcttccatgaggctccctggagggattgtccaataatggttgataattttggttgctgcacaaccggggctttgcccggggatttcatcccgttcaaggtgaggcccttgtagtaacctctccccgctgcgtgagcgaatacataagttcacccagtactgacagtgtcagcgccgcacgtgcgtgaaacgtgtgactcgcagactgaagcgacctatggtgaaaacggatgtaccatctagctgtggagtagtgaccctagaagctaatccgatggttccaccagtcgttgtttgccggcaaacgccacaaacggtttcgtgctttgcgtgaagaagcacggtctcttaagagttcattggtacggttgaccccgaacgaggtccgaacata

SEQ ID NO: 1327 - DNA, 487 bp, synthetic construct
  misc_feature 1..487: note = Description of Artificial Sequence: Synthetic polynucleotide
  source 1..487: mol_type = other DNA
ncctatgggttggtctacataggtgtgtcgggagcgacacgtatagaccatttcagtagttccgcgctaaaagcgactcctttggaatcggtgatttgccgattacatggaggctccctggagggattgcctatctgaaagataagatggctgctgcacagccgtgggcgaaacgtttgcgtttacaacgcgtaggagaggtcctaacaaacaacctctaacgtggtccaggtggtgacactctccattccgtcaaggacgaagctcgtccgtgaaacgagtgactcgcaccctgaatgagaagagagaataacggatgcttctggtagttgtggagtagtgaccctagaaactaatccccagaagacctctcgctcatggatgccggaccaggtccacacctagtttaggtgttttgatggtaaaagaaacaccgcagactctgtcttgacatgaccggttgaccccgtacgaggtccgacttata

SEQ ID NO: 1328 - DNA, 369 bp, synthetic construct
  misc_feature 1..369: note = Description of Artificial Sequence: Synthetic polynucleotide
  source 1..369: mol_type = other DNA
gggggttagagaaatcttgggagatttctatcgtcatagacatatgtgatgtacttacgtctctaggacgcctatgactggtttatactctgtcgagttgaacgtctggtggttcctacgtataagaactgcagtcttatgtgtgaaaccctacccctcgctaaccgagaacggttgtgtgatttgaggaacgttcgctgtttaaacttctttggaggaactttaaattgtattaattttgcatttgcaagagttagcccatctctaaaatgaggctatcgctgtgaacagccttaaagaccctctgggcaaactgattatgaattgagagttagacttctcagaaaaagtctggtcttgtcctagatt

SEQ ID NO: 1329 - DNA, 625 bp, synthetic construct
  source 1..625: mol_type = other DNA
gcggccgcgtcgacgggcccgcggaattccgccccccccccctctccctcccccccccctaacgttactggccgaagccgcttggaataaggccggtgtgcgtttgtctatatgttattttccaccatattgccgtcttttggcaatgtgagggcccggaaacctggccctgtcttcttgacgagcattcctaggggtctttcccctctcgccaaaggaatgcaaggtctgttgaatgtcgtgaaggaagcagttcctctggaagcttcttgaagacaaacaacgtctgtagcgaccctttgcaggcagcggaaccccccacctggcgacaggtgcctctgcggccaaaagccacgtgtataagatacacctgcaaaggcggcacaaccccagtgccacgttgtgagttggatagttgtggaaagagtcaaatggctctcctcaagcgtattcaacaaggggctgaaggatgcccagaaggtaccccattgtatgggatctgatctggggcctcggtgcacatgctttacatgtgtttagtcgaggttaaaaaaacgtctaggccccccgaaccacggggacgtggttttcctttgaaaaacacgatgataatatggccacaacc

SEQ ID NO: 1330 - DNA, 201 bp, synthetic construct
  source 1..201: mol_type = other DNA
gcaaaaatgtgatcttgcttgtaaatacaattttgagaggttaataaattacaagtagtgctatttttgtatttaggttagctatttagctttacgttccaggatgcctagtggcagccccacaatatccaggaagccctctctgcggtttttcagattaggtagtcgaaaaacctaagaaatttacctgctacatttcaa

SEQ ID NO: 1331 - DNA, 121 bp, synthetic construct
  source 1..121: mol_type = other DNA
gcgaccgggcattgcccccagtctcccccaaatttgggcattgtccccgggtcttccaacggactgggcgttgctcccggacactgaggactggccccggggtctcgctcaccttcagcag

SEQ ID NO: 1332 - DNA, 572 bp, synthetic construct
  source 1..572: mol_type = other DNA
cagggttcttaaatctgtttctctataagaacactcatttttcacgctttctgtcttctttcttccagggctctccccttgccctaggctctggccgttgcgcccggcggggtcaactccatgattagcatggagctgtaggagtctaaattggggacacagatgtttggaacgtcaccttgcagtgttaacttggctttcatgaatctctttgatcttccacaaggggtaggctacgggtgaaacctcttaggctaatacttctatgaagagatgccttggatagggtaacagcggcggatattggtgagttgttaagacaaaaaccattcaacgccggaggactgactctcatccagtggatgcattgagtggattgactgtcagggctgtctttaggcttaattccagacctctctgtgcttagggcaaacatcatttggccttaaatgggattctgtgagaggggatccctccattgacagctggactgttctttggggccttatgtggtgtttgcctctgaggtactcaggggcatttaggtttttcctcattcttaaataataatg

SEQ ID NO: 1333 - DNA, 259 bp, synthetic construct
  source 1..259: mol_type = other DNA
cacgcagaaagcgtctagccatggcgttagtatgagtgtcgtgcagcctccaggaccccccctcccgggagagccatagtggtctgcggaaccggtgagtacaccggaattgccaggacgaccgggtcctttcttggataaacccgctcaatgcctggagatttgggcgtgcccccgcaagactgctagccgagtagtgttgggtcgcgaaaggccttgtggtactgcctgatagggtgcttgcgagtgccccgggagg

SEQ ID NO: 1334 - DNA, 168 bp, synthetic construct
  source 1..168: mol_type = other DNA
cgctccaggggaatcagggcatcgcctccttttctgggaggacactcccttctgatggtgaatgggaactcccttcctcctgcagcagcctgcctgcagctgtcctggtagaacagtgtggacattgcagaagctgtcactgccccagaaagaaagcaccccagagcc

SEQ ID NO: 1335 - DNA, 278 bp, synthetic construct
  source 1..278: mol_type = other DNA
agtaggactagcataatgaggggggtagcaacagtggtgagttcgttggatggcttaagccctgagtacagggtagtcgtcagtggttcgacgccttggaataaaggtctcgagatgccacgtggacgagggcatgcccaaagcacatcttaacctgagcgggggtcgcccaggtaaaagcagttttaaccgactgttacgaatacagcctgatagggtgctgcagaggcccactgtattgctactaaaaatctctgctgtacatggcacatggagtt

SEQ ID NO: 1336 - DNA, 261 bp, synthetic construct
  source 1..261: mol_type = other DNA
gtgagaagcctaattattgacaaggtgtgaagagccgcgtgtgctcagtgtgcttcctccggcccctgaatgtggctaaccttaaccctgcagccgttgcccataatccaatgggtttgcggtcgtaatgcgtaagtgcgggatgggaccaactactttgggtgtccgtgtttcctgtttttcttttgattgcattttatggtgacaatttatagtgtatagattgtcatcatgggtgcacaagtatctagacaaaatgtt

SEQ ID NO: 1337 - DNA, 200 bp, synthetic construct
  source 1..200: mol_type = other DNA
ggcgcgccagtcctcatcctcctgctgaagtgacaagccacgctgcttctggagccaaagctgaccaagaagaacaaatccaccccagatctagactcaggtcacctcctgaagccctcgttcagggtcgatatccccacatcaaggacggtgaggatcttaaagaccactcaacagaaagtaaaaaacgactcggaccg

SEQ ID NO: 1338 - DNA, 200 bp, synthetic construct
  source 1..200: mol_type = other DNA
ggcgcgccagtcctagtgaaaacgttcctgctctcacagatcacgggacgctaccgctgcgcaacagcatcggaggagtccagcgagtgaccattactgacgccagacgccgcacctgcccctacgtttacaaggccctgggcatagtctcgccgcgcgtcctatcgagccgcactttttgagcaaaccgactcggaccg

SEQ ID NO: 1339 - DNA, 200 bp, synthetic construct
  source 1..200: mol_type = other DNA
ggcgcgccagtccttggttgaatgagatgcaaaaaattaggaaggacattgacctgtggaaaccttcagcaggtcattgcaactgggaggaagtagagttctgttccaaccactttcacaagcttgttatgagagatgggagaaccttggttgttccttgcagacatgaagttgagcttgtggggcgtcgactcggaccg

SEQ ID NO: 1340 - DNA, 200 bp, synthetic construct
  source 1..200: mol_type = other DNA
ggcgcgccagtcctagactcgggaactgcctgaatgtggtttgggacacgagacctcatcatattgatgagcgaacaaacaagaacatttcctccctcccctcctttgaattgaaatggcacattaagacttgtcacggcttctcactgggactggagacctcgttccttcaccccgcgtgtcgccagcgactcggaccg

SEQ ID NO: 1341 - DNA, 200 bp, synthetic construct
  source 1..200: mol_type = other DNA
ggcgcgccagtcctagtacagggcagtcgtcaacagttcaacacgcagaataggtttgcgtcttgatatgctgtgtggacgagggcatgcccacggtacatcttaacctatccgggggtcggataggcgaaagtccagtattggactgggagtacagcctgatagggtgttgcagagacccatctgatcgactcggaccg

SEQ ID NO: 1342 - DNA, 200 bp, synthetic construct
  source 1..200: mol_type = other DNA
ggcgcgccagtcctcctagtgagaggactcgggacagggaattggccctgggagaaaacgcgcggggggcgtccgagacgccccgtgaaagccgtgccgacccttgggaggactgacaggtctagagacacgtagccatcagcaatgtgggcctcccgggaataagtgaggggctctgtgtttcgaggcgactcggaccg

SEQ ID NO: 1343 - DNA, 251 bp, synthetic construct
  source 1..251: mol_type = other DNA
catgggacgctagttgtgaacaaggtgtgaagagcctattgagctacataagaatcctccggcccctgaatgcggctaatcccaacctcggagcaggtggtcacaaaccagtgattggcctgtcgtaacgcgcaagtccgtggcggaaccgactactttgggtgtccgtgtttccttttattttattgtggctgcttatggtgacaatcacagattgttatcataaagcgaattggattggccatccggtg

SEQ ID NO: 1344 - DNA, 463 bp, synthetic construct
  source 1..463: mol_type = other DNA
aagcaggtttccacaactgataaaactcgtgcaacttgaaactccgcctggtctttccaggtctagaggggttacactttgtactgtgctcgactccacgcccggtccactggcgggtgttagtagcagcactgttgtttcgtagcggagcatggtggccgtgggaactcctccttggtgacaagggcccacggggccgaaagccacgtccagacggacccaccatgtgtgcaaccccagcacggcaacttttactgcgaacaccaccttaaggtgacactggtactggtactcggtcactggtgacaggctaaggatgcccttcaggtaccccgaggtaacacgggacactcgggatctgagaaggggattgggacttctttaaaagtgcccagtttaaaaagcttctacgcctgaataggcgaccggaggccggcgcctttccattacccactactaaatc

SEQ ID NO: 1345 - DNA, 611 bp, synthetic construct
  source 1..611: mol_type = other DNA
gggcccgcggaattccgccccccccccctctccctcccccccccctaacgttactggccgaagccgcttggaataaggccggtgtgcgtttgtctatatgttattttccaccatattgccgtcttttggcaatgtgagggcccggaaacctggccctgtcttcttgacgagcattcctaggggtctttcccctctcgccaaaggaatgcaaggtctgttgaatgtcgtgaaggaagcagttcctctggaagcttcttgaagacaaacaacgtctgtagcgaccctttgcaggcagcggaaccccccacctggcgacaggtgcctctgcggccaaaagccacgtgtataagatacacctgcaaaggcggcacaaccccagtgccacgttgtgagttggatagttgtggaaagagtcaaatggctctcctcaagcgtattcaacaaggggctgaaggatgcccagaaggtaccccattgtatgggatctgatctggggcctcggtgcacatgctttacatgtgtttagtcgaggttaaaaaaacgtctaggccccccgaaccacggggacgtggttttcctttgaaaaacacgatgataatatggccacaacc

SEQ ID NO: 1346 - DNA, 609 bp, synthetic construct
  source 1..609: mol_type = other DNA
ggcccgcggaattccgccccccccccctctccctcccccccccctaacgttactggccgaagccgcttggaataaggccggtgtgcgtttgtctatatgttattttccaccatattgccgtcttttggcaatgtgagggcccggaaacctggccctgtcttcttgacgagcattcctaggggtctttcccctctcgccaaaggaatgcaaggtctgttgaatgtcgtgaaggaagcagttcctctggaagcttcttgaagacaaacaacgtctgtagcgaccctttgcaggcagcggaaccccccacctggcgacaggtgcctctgcggccaaaagccacgtgtataagatacacctgcaaaggcggcacaaccccagtgccacgttgtgagttggatagttgtggaaagagtcaaatggctctcctcaagcgtattcaacaaggggctgaaggatgcccagaaggtaccccattgtatgggatctgatctggggcctcggtgcacatgctttacatgtgtttagtcgaggttaaaaaacgtctaggccccccgaaccacggggacgtggttttcctttgaaaaacacgatgataatatggccacaacc

SEQ ID NO: 1347 - DNA, 743 bp, synthetic construct
  source 1..743: mol_type = other DNA
ttaaaacagctgtgggttgtcacccacccacagggtccactgggcgctagtacactggtatctcggtacctttgtacgcctgttttataccccctccctgatttgcaacttagaagcaacgcaaaccagatcaatagtaggtgtgacataccagtcgcatcttgatcaagcacttctgtatccccggaccgagtatcaatagactgtgcacacggttgaaggagaaaacgtccgttacccggctaactacttcgagaagcctagtaacgccattgaagttgcagagtgtttcgctcagcactccccccgtgtagatcaggtcgatgagtcaccgcattccccacgggcgaccgtggcggtggctgcgttggcggcctgcctatggggtaacccataggacgctctaatacggacatggcgtgaagagtctattgagctagttagtagtcctccggcccctgaatgcggctaatcctaactgcggagcacatacccttaatccaaagggcagtgtgtcgtaacgggcaactctgcagcggaaccgactactttgggtgtccgtgtttctttttattcttgtattggctgcttatggtgacaattaaagaattgttaccatatagctattggattggccatccagtgtcaaacagagctattgtatatctctttgttggattcacacctctcactcttgaaacgttacacaccctcaattacattatactgctgaacacgaagcg

SEQ ID NO: 1348 - DNA, 741 bp, synthetic construct; identical to SEQ ID NO: 1115
  source 1..741: mol_type = other DNA

SEQ ID NO: 1349 - DNA, 56 bp, synthetic construct
  source 1..56: mol_type = other DNA
gccatcagtcgccggtcccaagcccggataaaatgggagggggcgggaaaccgcct

SEQ ID NO: 1350 - DNA, 55 bp, synthetic construct
  source 1..55: mol_type = other DNA
aacactgccaatgccggtcccaagcccggataaaagtggagggtacagtccacgc

SEQ ID NO: 1351 - DNA, 21 bp, synthetic construct
  source 1..21: mol_type = other DNA
aaccatgccgactgatggcag

SEQ ID NO: 1352 - DNA, 26 bp, synthetic construct
  source 1..26: mol_type = other DNA
ctgccatcagtcggcgtggactgtag

SEQ ID NO: 1353 - DNA, 542 bp, synthetic construct
  source 1..542: mol_type = other DNA
aatcaacctctggattacaaaatttgtgaaagattgactggtattcttaactatgttgctccttttacgctatgtggatacgctgctttaatgcctttgtatcatgctattgcttcccgtatggctttcattttctcctccttgtataaatcctggttgctgtctctttatgaggagttgtggcccgttgtcaggcaacgtggcgtggtgtgcactgtgtttgctgacgcaacccccactggttggggcattgccaccacctgtcagctcctttccgggactttcgctttccccctccctattgccacggcggaactcatcgccgcctgccttgcccgctgctggacaggggctcggctgttgggcactgacaattccgtggtgttgtcggggaaatcatcgtcctttccttggctgctcgcctgtgttgccacctggattctgcgcgggacgtccttctgctacgtcccttcggccctcaatccagcggaccttccttcccgcggcctgctgccggctctgcggcctcttccgcgtcttcg

SEQ ID NO: 1354 - DNA, 278 bp, synthetic construct
  source 1..278: mol_type = other DNA
caagcacgcagcaatgcagctcaaaacgcttagcctagccacacccccacgggaaacagcagtgattaacctttagcaataaacgaaagtttaactaagctatactaaccccagggttggtcaatttcgtgccagccacaccctggtactgcatgcacgcaatgctagctgcccctttcccgtcctgggtaccccgagtctcccccgacctcgggtcccaggtatgctcccacctccacctgccccactcaccacctctgctagttccagacacctcc

SEQ ID NO: 1355 - DNA, 291 bp, synthetic construct
  source 1..291: mol_type = other DNA
caagcacgcagcaatgcagctcaaaacgcttagcctagccacacccccacgggaaacagcagtgattaacctttagcaataaacgaaagtttaactaagctatactaaccccagggttggtcaatttcgtgccagccacaccttccagccagacacccgccccccggccctggctaagaagttgcttcctgttgccagcatgacctaccctcgcctctttgatgccatccgctgccacctccttttgctcctggaccctttagcctctctgcccttccactctctgacccc

SEQ ID NO: 1356 - DNA, 278 bp, synthetic construct
  source 1..278: mol_type = other DNA
ctggtactgcatgcacgcaatgctagctgcccctttcccgtcctgggtaccccgagtctcccccgacctcgggtcccaggtatgctcccacctccacctgccccactcaccacctctgctagttccagacacctcccaagcacgcagcaatgcagctcaaaacgcttagcctagccacacccccacgggaaacagcagtgattaacctttagcaataaacgaaagtttaactaagctatactaaccccagggttggtcaatttcgtgccagccacacc

SEQ ID NO: 1357 - DNA, 278 bp, synthetic construct
  source 1..278: mol_type = other DNA
ctggtactgcatgcacgcaatgctagctgcccctttcccgtcctgggtaccccgagtctcccccgacctcgggtcccaggtatgctcccacctccacctgccccactcaccacctctgctagttccagacacctccgagagctcgctttcttgctgtccaatttctattaaaggttcctttgttccctaagtccaactactaaactgggggatattatgaagggccttgagcatctggattctgcctaataaaaaacatttattttcattgctgcgtc

SEQ ID NO: 1358 - DNA, 285 bp, synthetic construct
  source 1..285: mol_type = other DNA
tgcccgtcctcaccaagactgactgcctgctgctttgctactgcccgggcccatgagactgacttcccactgctctgcctgcctctccccactgcactggcacagccccgccttgccgctgctgatccattgccggtgtgaccgagagctcgctttcttgctgtccaatttctattaaaggttcctttgttccctaagtccaactactaaactgggggatattatgaagggccttgagcatctggattctgcctaataaaaaacatttattttcattgctgcgtc

SEQ ID NO: 1359 - DNA, 284 bp, synthetic construct
  source 1..284: mol_type = other DNA
gagagctcgctttcttgctgtccaatttctattaaaggttcctttgttccctaagtccaactactaaactgggggatattatgaagggccttgagcatctggattctgcctaataaaaaacatttattttcattgctgcgtcgagagctcgctttcttgctgtccaatttctattaaaggttcctttgttccctaagtccaactactaaactgggggatattatgaagggccttgagcatctggattctgcctaataaaaaacatttattttcattgctgcgtc

SEQ ID NO: 1360 - DNA, 111 bp, synthetic construct
  source 1..111: mol_type = other DNA
gctggagcctcggtggcctagcttcttgccccttgggcctccccccagcccctcctccccttcctgcacccgtacccccgtggtctttgaataaagtctgagtgggcggca

SEQ ID NO: 1361 - DNA, 1098 bp, synthetic construct
  source 1..1098: mol_type = other DNA
gccatcagtcgccggtcccaagcccggataaaatgggagggggcgggaaaccgcctaaccatgccgactgatggcagagcggccgcgtcgacgcaaaaatgtgatcttgcttgtaaatacaattttgagaggttaataaattacaagtagtgctatttttgtatttaggttagctatttagctttacgttccaggatgcctagtggcagccccacaatatccaggaagccctctctgcggtttttcagattaggtagtcgaaaaacctaagaaatttacctgctacatttcaaatggtgagcaagggcgaggagctgttcaccggggtggtgcccatcctggtcgagctggacggcgacgtaaacggccacaagttcagcgtgtccggcgagggcgagggcgatgccacctacggcaagctgaccctgaagttcatctgcaccaccggcaagctgcccgtgccctggcccaccctcgtgaccaccctgacctacggcgtgcagtgcttcagccgctaccccgaccacatgaagcagcacgacttcttcaagtccgccatgcccgaaggctacgtccaggagcgcaccatcttcttcaaggacgacggcaactacaagacccgcgccgaggtgaagttcgagggcgacaccctggtgaaccgcatcgagctgaagggcatcgacttcaaggaggacggcaacatcctggggcacaagctggagtacaactacaacagccacaacgtctatatcatggccgacaagcagaagaacggcatcaaggtgaacttcaagatccgccacaacatcgaggacggcagcgtgcagctcgccgaccactaccagcagaacacccccatcggcgacggccccgtgctgctgcccgacaaccactacctgagcacccagtccgccctgagcaaagaccccaacgagaagcgcgatcacatggtcctgctggagttcgtgaccgccgccgggatcactctcggcatggacgagctgtacaagtaaaaaactgccatcagtcggcgtggactgtagaacactgccaatgccggtcccaagcccggataaaagtggagggtacagtccacgc

SEQ ID NO: 1362 - DNA, 1018 bp, synthetic construct
  source 1..1018: mol_type = other DNA
gccatcagtcgccggtcccaagcccggataaaatgggagggggcgggaaaccgcctaaccatgccgactgatggcagagcggccgcgtcgacgcgaccgggcattgcccccagtctcccccaaatttgggcattgtccccgggtcttccaacggactgggcgttgctcccggacactgaggactggccccggggtctcgctcaccttcagcagatggtgagcaagggcgaggagctgttcaccggggtggtgcccatcctggtcgagctggacggcgacgtaaacggccacaagttcagcgtgtccggcgagggcgagggcgatgccacctacggcaagctgaccctgaagttcatctgcaccaccggcaagctgcccgtgccctggcccaccctcgtgaccaccctgacctacggcgtgcagtgcttcagccgctaccccgaccacatgaagcagcacgacttcttcaagtccgccatgcccgaaggctacgtccaggagcgcaccatcttcttcaaggacgacggcaactacaagacccgcgccgaggtgaagttcgagggcgacaccctggtgaaccgcatcgagctgaagggcatcgacttcaaggaggacggcaacatcctggggcacaagctggagtacaactacaacagccacaacgtctatatcatggccgacaagcagaagaacggcatcaaggtgaacttcaagatccgccacaacatcgaggacggcagcgtgcagctcgccgaccactaccagcagaacacccccatcggcgacggccccgtgctgctgcccgacaaccactacctgagcacccagtccgccctgagcaaagaccccaacgagaagcgcgatcacatggtcctgctggagttcgtgaccgccgccgggatcactctcggcatggacgagctgtacaagtaaaaaactgccatcagtcggcgtggactgtagaacactgccaatgccggtcccaagcccggataaaagtggagggtacagtccacgc

SEQ ID NO: 1363 - DNA, 1469 bp, synthetic construct
  source 1..1469: mol_type = other DNA
gccatcagtcgccggtcccaagcccggataaaatgggagggggcgggaaaccgcctaaccatgccgactgatggcagagcggccgcgtcgaccagggttcttaaatctgtttctctataagaacactcatttttcacgctttctgtcttctttcttccagggctctccccttgccctaggctctggccgttgcgcccggcggggtcaactccatgattagcatggagctgtaggagtctaaattggggacacagatgtttggaacgtcaccttgcagtgttaacttggctttcatgaatctctttgatcttccacaaggggtaggctacgggtgaaacctcttaggctaatacttctatgaagagatgccttggatagggtaacagcggcggatattggtgagttgttaagacaaaaaccattcaacgccggaggactgactctcatccagtggatgcattgagtggattgactgtcagggctgtctttaggcttaattccagacctctctgtgcttagggcaaacatcatttggccttaaatgggattctgtgagaggggatccctccattgacagctggactgttctttggggccttatgtggtgtttgcctctgaggtactcaggggcatttaggtttttcctcattcttaaataataatgatggtgagcaagggcgaggagctgttcaccggggtggtgcccatcctggtcgagctggacggcgacgtaaacggccacaagttcagcgtgtccggcgagggcgagggcgatgccacctacggcaagctgaccctgaagttcatctgcaccaccggcaagctgcccgtgccctggcccaccctcgtgaccaccctgacctacggcgtgcagtgcttcagccgctaccccgaccacatgaagcagcacgacttcttcaagtccgccatgcccgaaggctacgtccaggagcgcaccatcttcttcaaggacgacggcaactacaagacccgcgccgaggtgaagttcgagggcgacaccctggtgaaccgcatcgagctgaagggcatcgacttcaaggaggacggcaacatcctggggcacaagctggagtacaactacaacagccacaacgtctatatcatggccgacaagcagaagaacggcatcaaggtgaacttcaagatccgccacaacatcgaggacggcagcgtgcagctcgccgaccactaccagcagaacacccccatcggcgacggccccgtgctgctgcccgacaaccactacctgagcacccagtccgccctgagcaaagaccccaacgagaagcgcgatcacatggtcctgctggagttcgtgaccgccgccgggatcactctcggcatggacgagctgtacaagtaaaaaactgccatcagtcggcgtggactgtagaacactgccaatgccggtcccaagcccggataaaagtggagggtacagtccacgc

SEQ ID NO: 1364 - DNA, 1156 bp, synthetic construct
  source 1..1156: mol_type = other DNA
gccatcagtcgccggtcccaagcccggataaaatgggagggggcgggaaaccgcctaaccatgccgactgatggcagagcggccgcgtcgaccacgcagaaagcgtctagccatggcgttagtatgagtgtcgtgcagcctccaggaccccccctcccgggagagccatagtggtctgcggaaccggtgagtacaccggaattgccaggacgaccgggtcctttcttggataaacccgctcaatgcctggagatttgggcgtgcccccgcaagactgctagccgagtagtgttgggtcgcgaaaggccttgtggtactgcctgatagggtgcttgcgagtgccccgggaggatggtgagcaagggcgaggagctgttcaccggggtggtgcccatcctggtcgagctggacggcgacgtaaacggccacaagttcagcgtgtccggcgagggcgagggcgatgccacctacggcaagctgaccctgaagttcatctgcaccaccggcaagctgcccgtgccctggcccaccctcgtgaccaccctgacctacggcgtgcagtgcttcagccgctaccccgaccacatgaagcagcacgacttcttcaagtccgccatgcccgaaggctacgtccaggagcgcaccatcttcttcaaggacgacggcaactacaagacccgcgccgaggtgaagttcgagggcgacaccctggtgaaccgcatcgagctgaagggcatcgacttcaaggaggacggcaacatcctggggcacaagctggagtacaactacaacagccacaacgtctatatcatggccgacaagcagaagaacggcatcaaggtgaacttcaagatccgccacaacatcgaggacggcagcgtgcagctcgccgaccactaccagcagaacacccccatcggcgacggccccgtgctgctgcccgacaaccactacctgagcacccagtccgccctgagcaaagaccccaacgagaagcgcgatcacatggtcctgctggagttcgtgaccgccgccgggatcactctcggcatggacgagctgtacaagtaaaaaactgccatcagtcggcgtggactgtagaacactgccaatgccggtcccaagcccggataaaagtggagggtacagtccacgc

SEQ ID NO: 1365 - DNA, 1064 bp, synthetic construct
  source 1..1064: mol_type = other DNA
gccatcagtcgccggtcccaagcccggataaaatgggagggggcgggaaaccgcctaaccatgccgactgatggcagagcggccgcgtcgaccgctccaggggaatcagggcatcgcctccttttctgggaggacactcccttctgatggtgaatgggaactcccttcctcctgcagcagcctgcctgcagctgtcctggtagaacagtgtggacattgcagaagctgtcactgccccagaaagaaagcaccccagagccatggtgagcaagggcgaggagctgttcaccggggtggtgcccatcctggtcgagctggacggcgacgtaaacggccacaagttcagcgtgtccggcgagggcgagggcgatgccacctacggcaagctgaccctgaagttcatctgcaccaccggcaagctgcccgtgccctggcccaccctcgtgaccaccctgacctacggcgtgcagtgcttcagccgctaccccgaccacatgaagcagcacgacttcttcaagtccgccatgcccgaaggctacgtccaggagcgcaccatcttcttcaaggacgacggcaactacaagacccgcgccgaggtgaagttcgagggcgacaccctggtgaaccgcatcgagctgaagggcatcgacttcaaggaggacggcaacatcctggggcacaagctggagtacaactacaacagccacaacgtctatatcatggccgacaagcagaagaacggcatcaaggtgaacttcaagatccgccacaacatcgaggacggcagcgtgcagctcgccgaccactaccagcagaacacccccatcggcgacggccccgtgctgctgcccgacaaccactacctgagcacccagtccgccctgagcaaagaccccaacgagaagcgcgatcacatggtcctgctggagttcgtgaccgccgccgggatcactctcggcatggacgagctgtacaagtaaaaactgccatcagtcggcgtggactgtagaacactgccaatgccggtcccaagcccggataaaagtggagggtacagtccacgc

SEQ ID NO: 1366 - DNA, 1175 bp, synthetic construct
  source 1..1175: mol_type = other DNA
gccatcagtcgccggtcccaagcccggataaaatgggagggggcgggaaaccgcctaaccatgccgactgatggcagagcggccgcgtcgacagtaggactagcataatgaggggggtagcaacagtggtgagttcgttggatggcttaagccctgagtacagggtagtcgtcagtggttcgacgccttggaataaaggtctcgagatgccacgtggacgagggcatgcccaaagcacatcttaacctgagcgggggtcgcccaggtaaaagcagttttaaccgactgttacgaatacagcctgatagggtgctgcagaggcccactgtattgctactaaaaatctctgctgtacatggcacatggagttatggtgagcaagggcgaggagctgttcaccggggtggtgcccatcctggtcgagctggacggcgacgtaaacggccacaagttcagcgtgtccggcgagggcgagggcgatgccacctacggcaagctgaccctgaagttcatctgcaccaccggcaagctgcccgtgccctggcccaccctcgtgaccaccctgacctacggcgtgcagtgcttcagccgctaccccgaccacatgaagcagcacgacttcttcaagtccgccatgcccgaaggctacgtccaggagcgcaccatcttcttcaaggacgacggcaactacaagacccgcgccgaggtgaagttcgagggcgacaccctggtgaaccgcatcgagctgaagggcatcgacttcaaggaggacggcaacatcctggggcacaagctggagtacaactacaacagccacaacgtctatatcatggccgacaagcagaagaacggcatcaaggtgaacttcaagatccgccacaacatcgaggacggcagcgtgcagctcgccgaccactaccagcagaacacccccatcggcgacggccccgtgctgctgcccgacaaccactacctgagcacccagtccgccctgagcaaagaccccaacgagaagcgcgatcacatggtcctgctggagttcgtgaccgccgccgggatcactctcggcatggacgagctgtacaagtaaaaaactgccatcagtcggcgtggactgtagaacactgccaatgccggtcccaagcccggataaaagtggagggtacagtccacgc

SEQ ID NO: 1367 - DNA, 1158 bp, synthetic construct
  source 1..1158: mol_type = other DNA
gccatcagtcgccggtcccaagcccggataaaatgggagggggcgggaaaccgcctaaccatgccgactgatggcagagcggccgcgtcgacgtgagaagcctaattattgacaaggtgtgaagagccgcgtgtgctcagtgtgcttcctccggcccctgaatgtggctaaccttaaccctgcagccgttgcccataatccaatgggtttgcggtcgtaatgcgtaagtgcgggatgggaccaactactttgggtgtccgtgtttcctgtttttcttttgattgcattttatggtgacaatttatagtgtatagattgtcatcatgggtgcacaagtatctagacaaaatgttatggtgagcaagggcgaggagctgttcaccggggtggtgcccatcctggtcgagctggacggcgacgtaaacggccacaagttcagcgtgtccggcgagggcgagggcgatgccacctacggcaagctgaccctgaagttcatctgcaccaccggcaagctgcccgtgccctggcccaccctcgtgaccaccctgacctacggcgtgcagtgcttcagccgctaccccgaccacatgaagcagcacgacttcttcaagtccgccatgcccgaaggctacgtccaggagcgcaccatcttcttcaaggacgacggcaactacaagacccgcgccgaggtgaagttcgagggcgacaccctggtgaaccgcatcgagctgaagggcatcgacttcaaggaggacggcaacatcctggggcacaagctggagtacaactacaacagccacaacgtctatatcatggccgacaagcagaagaacggcatcaaggtgaacttcaagatccgccacaacatcgaggacggcagcgtgcagctcgccgaccactaccagcagaacacccccatcggcgacggccccgtgctgctgcccgacaaccactacctgagcacccagtccgccctgagcaaagaccccaacgagaagcgcgatcacatggtcctgctggagttcgtgaccgccgccgggatcactctcggcatggacgagctgtacaagtaaaaaactgccatcagtcggcgtggactgtagaacactgccaatgccggtcccaagcccggataaaagtggagggtacagtccacgc

SEQ ID NO: 1368 - DNA, 1097 bp, synthetic construct
  source 1..1097: mol_type = other DNA
gccatcagtcgccggtcccaagcccggataaaatgggagggggcgggaaaccgcctaaccatgccgactgatggcagagcggccgcgtcgacggcgcgccagtcctcatcctcctgctgaagtgacaagccacgctgcttctggagccaaagctgaccaagaagaacaaatccaccccagatctagactcaggtcacctcctgaagccctcgttcagggtcgatatccccacatcaaggacggtgaggatcttaaagaccactcaacagaaagtaaaaaacgactcggaccgatggtgagcaagggcgaggagctgttcaccggggtggtgcccatcctggtcgagctggacggcgacgtaaacggccacaagttcagcgtgtccggcgagggcgagggcgatgccacctacggcaagctgaccctgaagttcatctgcaccaccggcaagctgcccgtgccctggcccaccctcgtgaccaccctgacctacggcgtgcagtgcttcagccgctaccccgaccacatgaagcagcacgacttcttcaagtccgccatgcccgaaggctacgtccaggagcgcaccatcttcttcaaggacgacggcaactacaagacccgcgccgaggtgaagttcgagggcgacaccctggtgaaccgcatcgagctgaagggcatcgacttcaaggaggacggcaacatcctggggcacaagctggagtacaactacaacagccacaacgtctatatcatggccgacaagcagaagaacggcatcaaggtgaacttcaagatccgccacaacatcgaggacggcagcgtgcagctcgccgaccactaccagcagaacacccccatcggcgacggccccgtgctgctgcccgacaaccactacctgagcacccagtccgccctgagcaaagaccccaacgagaagcgcgatcacatggtcctgctggagttcgtgaccgccgccgggatcactctcggcatggacgagctgtacaagtaaaaaactgccatcagtcggcgtggactgtagaacactgccaatgccggtcccaagcccggataaaagtggagggtacagtccacgc

SEQ ID NO: 1369 - DNA, 1097 bp, synthetic construct
  source 1..1097: mol_type = other DNA
gccatcagtcgccggtcccaagcccggataaaatgggagggggcgggaaaccgcctaaccatgccgactgatggcagagcggccgcgtcgacggcgcgccagtcctagtgaaaacgttcctgctctcacagatcacgggacgctaccgctgcgcaacagcatcggaggagtccagcgagtgaccattactgacgccagacgccgcacctgcccctacgtttacaaggccctgggcatagtctcgccgcgcgtcctatcgagccgcactttttgagcaaaccgactcggaccgatggtgagcaagggcgaggagctgttcaccggggtggtgcccatcctggtcgagctggacggcgacgtaaacggccacaagttcagcgtgtccggcgagggcgagggcgatgccacctacggcaagctgaccctgaagttcatctgcaccaccggcaagctgcccgtgccctggcccaccctcgtgaccaccctgacctacggcgtgcagtgcttcagccgctaccccgaccacatgaagcagcacgacttcttcaagtccgccatgcccgaaggctacgtccaggagcgcaccatcttcttcaaggacgacggcaactacaagacccgcgccgaggtgaagttcgagggcgacaccctggtgaaccgcatcgagctgaagggcatcgacttcaaggaggacggcaacatcctggggcacaagctggagtacaactacaacagccacaacgtctatatcatggccgacaagcagaagaacggcatcaaggtgaacttcaagatccgccacaacatcgaggacggcagcgtgcagctcgccgaccactaccagcagaacacccccatcggcgacggccccgtgctgctgcccgacaaccactacctgagcacccagtccgccctgagcaaagaccccaacgagaagcgcgatcacatggtcctgctggagttcgtgaccgccgccgggatcactctcggcatggacgagctgtacaagtaaaaaactgccatcagtcggcgtggactgtagaacactgccaatgccggtcccaagcccggataaaagtggagggtacagtccacgc

SEQ ID NO: 1370 - DNA, 1097 bp, synthetic construct
  source 1..1097: mol_type = other DNA
gccatcagtcgccggtcccaagcccggataaaatgggagggggcgggaaaccgcctaaccatgccgactgatggcagagcggccgcgtcgacggcgcgccagtccttggttgaatgagatgcaaaaaattaggaaggacattgacctgtggaaaccttcagcaggtcattgcaactgggaggaagtagagttctgttccaaccactttcacaagcttgttatgagagatgggagaaccttggttgttccttgcagacatgaagttgagcttgtggggcgtcgactcggaccgatggtgagcaagggcgaggagctgttcaccggggtggtgcccatcctggtcgagctggacggcgacgtaaacggccacaagttcagcgtgtccggcgagggcgagggcgatgccacctacggcaagctgaccctgaagttcatctgcaccaccggcaagctgcccgtgccctggcccaccctcgtgaccaccctgacctacggcgtgcagtgcttcagccgctaccccgaccacatgaagcagcacgacttcttcaagtccgccatgcccgaaggctacgtccaggagcgcaccatcttcttcaaggacgacggcaactacaagacccgcgccgaggtgaagttcgagggcgacaccctggtgaaccgcatcgagctgaagggcatcgacttcaaggaggacggcaacatcctggggcacaagctggagtacaactacaacagccacaacgtctatatcatggccgacaagcagaagaacggcatcaaggtgaacttcaagatccgccacaacatcgaggacggcagcgtgcagctcgccgaccactaccagcagaacacccccatcggcgacggccccgtgctgctgcccgacaaccactacctgagcacccagtccgccctgagcaaagaccccaacgagaagcgcgatcacatggtcctgctggagttcgtgaccgccgccgggatcactctcggcatggacgagctgtacaagtaaaaaactgccatcagtcggcgtggactgtagaacactgccaatgccggtcccaagcccggataaaagtggagggtacagtccacgc

SEQ ID NO: 1371 - DNA, 1097 bp, synthetic construct
  source 1..1097: mol_type = other DNA
gccatcagtcgccggtcccaagcccggataaaatgggagggggcgggaaaccgcctaaccatgccgactgatggcagagcggccgcgtcgacggcgcgccagtcctagactcgggaactgcctgaatgtggtttgggacacgagacctcatcatattgatgagcgaacaaacaagaacatttcctccctcccctcctttgaattgaaatggcacattaagacttgtcacggcttctcactgggactggagacctcgttccttcaccccgcgtgtcgccagcgactcggaccgatggtgagcaagggcgaggagctgttcaccggggtggtgcccatcctggtcgagctggacggcgacgtaaacggccacaagttcagcgtgtccggcgagggcgagggcgatgccacctacggcaagctgaccctgaagttcatctgcaccaccggcaagctgcccgtgccctggcccaccctcgtgaccaccctgacctacggcgtgcagtgcttcagccgctaccccgaccacatgaagcagcacgacttcttcaagtccgccatgcccgaaggctacgtccaggagcgcaccatcttcttcaaggacgacggcaactacaagacccgcgccgaggtgaagttcgagggcgacaccctggtgaaccgcatcgagctgaagggcatcgacttcaaggaggacggcaacatcctggggcacaagctggagtacaactacaacagccacaacgtctatatcatggccgacaagcagaagaacggcatcaaggtgaacttcaagatccgccacaacatcgaggacggcagcgtgcagctcgccgaccactaccagcagaacacccccatcggcgacggccccgtgctgctgcccgacaaccactacctgagcacccagtccgccctgagcaaagaccccaacgagaagcgcgatcacatggtcctgctggagttcgtgaccgccgccgggatcactctcggcatggacgagctgtacaagtaaaaaactgccatcagtcggcgtggactgtagaacactgccaatgccggtcccaagcccggataaaagtggagggtacagtccacgc

SEQ ID NO: 1372 - DNA, 1097 bp, synthetic construct
  source 1..1097: mol_type = other DNA
gccatcagtcgccggtcccaagcccggataaaatgggagggggcgggaaaccgcctaaccatgccgactgatggcagagcggccgcgtcgacggcgcgccagtcctagtacagggcagtcgtcaacagttcaacacgcagaataggtttgcgtcttgatatgctgtgtggacgagggcatgcccacggtacatcttaacctatccgggggtcggataggcgaaagtccagtattggactgggagtacagcctgatagggtgttgcagagacccatctgatcgactcggaccgatggtgagcaagggcgaggagctgttcaccggggtggtgcccatcctggtcgagctggacggcgacgtaaacggccacaagttcagcgtgtccggcgagggcgagggcgatgccacctacggcaagctgaccctgaagttcatctgcaccaccggcaagctgcccgtgccctggcccaccctcgtgaccaccctgacctacggcgtgcagtgcttcagccgctaccccgaccacatgaagcagcacgacttcttcaagtccgccatgcccgaaggctacgtccaggagcgcaccatcttcttcaaggacgacggcaactacaagacccgcgccgaggtgaagttcgagggcgacaccctggtgaaccgcatcgagctgaagggcatcgacttcaaggaggacggcaacatcctggggcacaagctggagtacaactacaacagccacaacgtctatatcatggccgacaagcagaagaacggcatcaaggtgaacttcaagatccgccacaacatcgaggacggcagcgtgcagctcgccgaccactaccagcagaacacccccatcggcgacggccccgtgctgctgcccgacaaccactacctgagcacccagtccgccctgagcaaagaccccaacgagaagcgcgatcacatggtcctgctggagttcgtgaccgccgccgggatcactctcggcatggacgagctgtacaagtaaaaaactgccatcagtcggcgtggactgtagaacactgccaatgccggtcccaagcccggataaaagtggagggtacagtccacgc

SEQ ID NO: 1373 - DNA, 1097 bp, synthetic construct
  source 1..1097: mol_type = other DNA
gccatcagtcgccggtcccaagcccggataaaatgggagggggcgggaaaccgcctaaccatgccgactgatggcagagcggccgcgtcgacggcgcgccagtcctcctagtgagaggactcgggacagggaattggccctgggagaaaacgcgcggggggcgtccgagacgccccgtgaaagccgtgccgacccttgggaggactgacaggtctagagacacgtagccatcagcaatgtgggcctcccgggaataagtgaggggctctgtgtttcgaggcgactcggaccgatggtgagcaagggcgaggagctgttcaccggggtggtgcccatcctggtcgagctggacggcgacgtaaacggccacaagttcagcgtgtccggcgagggcgagggcgatgccacctacggcaagctgaccctgaagttcatctgcaccaccggcaagctgcccgtgccctggcccaccctcgtgaccaccctgacctacggcgtgcagtgcttcagccgctaccccgaccacatgaagcagcacgacttcttcaagtccgccatgcccgaaggctacgtccaggagcgcaccatcttcttcaaggacgacggcaactacaagacccgcgccgaggtgaagttcgagggcgacaccctggtgaaccgcatcgagctgaagggcatcgacttcaaggaggacggcaacatcctggggcacaagctggagtacaactacaacagccacaacgtctatatcatggccgacaagcagaagaacggcatcaaggtgaacttcaagatccgccacaacatcgaggacggcagcgtgcagctcgccgaccactaccagcagaacacccccatcggcgacggccccgtgctgctgcccgacaaccactacctgagcacccagtccgccctgagcaaagaccccaacgagaagcgcgatcacatggtcctgctggagttcgtgaccgccgccgggatcactctcggcatggacgagctgtacaagtaaaaaactgccatcagtcggcgtggactgtagaacactgccaatgccggtcccaagcccggataaaagtggagggtacagtccacgc

SEQ ID NO: 1374 - DNA, 1148 bp, synthetic construct
  source 1..1148: mol_type = other DNA
gccatcagtcgccggtcccaagcccggataaaatgggagggggcgggaaaccgcctaaccatgccgactgatggcagagcggccgcgtcgaccatgggacgctagttgtgaacaaggtgtgaagagcctattgagctacataagaatcctccggcccctgaatgcggctaatcccaacctcggagcaggtggtcacaaaccagtgattggcctgtcgtaacgcgcaagtccgtggcggaaccgactactttgggtgtccgtgtttccttttattttattgtggctgcttatggtgacaatcacagattgttatcataaagcgaattggattggccatccggtgatggtgagcaagggcgaggagctgttcaccggggtggtgcccatcctggtcgagctggacggcgacgtaaacggccacaagttcagcgtgtccggcgagggcgagggcgatgccacctacggcaagctgaccctgaagttcatctgcaccaccggcaagctgcccgtgccctggcccaccctcgtgaccaccctgacctacggcgtgcagtgcttcagccgctaccccgaccacatgaagcagcacgacttcttcaagtccgccatgcccgaaggctacgtccaggagcgcaccatcttcttcaaggacgacggcaactacaagacccgcgccgaggtgaagttcgagggcgacaccctggtgaaccgcatcgagctgaagggcatcgacttcaaggaggacggcaacatcctggggcacaagctggagtacaactacaacagccacaacgtctatatcatggccgacaagcagaagaacggcatcaaggtgaacttcaagatccgccacaacatcgaggacggcagcgtgcagctcgccgaccactaccagcagaacacccccatcggcgacggccccgtgctgctgcccgacaaccactacctgagcacccagtccgccctgagcaaagaccccaacgagaagcgcgatcacatggtcctgctggagttcgtgaccgccgccgggatcactctcggcatggacgagctgtacaagtaaaaaactgccatcagtcggcgtggactgtagaacactgccaatgccggtcccaagcccggataaaagtggagggtacagtccacgc

SEQ ID NO: 1375 - DNA, 1360 bp, synthetic construct
  source 1..1360: mol_type = other DNA
gccatcagtcgccggtcccaagcccggataaaatgggagggggcgggaaaccgcctaaccatgccgactgatggcagagcggccgcgtcgacaagcaggtttccacaactgataaaactcgtgcaacttgaaactccgcctggtctttccaggtctagaggggttacactttgtactgtgctcgactccacgcccggtccactggcgggtgttagtagcagcactgttgtttcgtagcggagcatggtggccgtgggaactcctccttggtgacaagggcccacggggccgaaagccacgtccagacggacccaccatgtgtgcaaccccagcacggcaacttttactgcgaacaccaccttaaggtgacactggtactggtactcggtcactggtgacaggctaaggatgcccttcaggtaccccgaggtaacacgggacactcgggatctgagaaggggattgggacttctttaaaagtgcccagtttaaaaagcttctacgcctgaataggcgaccggaggccggcgcctttccattacccactactaaatcatggtgagcaagggcgaggagctgttcaccggggtggtgcccatcctggtcgagctggacggcgacgtaaacggccacaagttcagcgtgtccggcgagggcgagggcgatgccacctacggcaagctgaccctgaagttcatctgcaccaccggcaagctgcccgtgccctggcccaccctcgtgaccaccctgacctacggcgtgcagtgcttcagccgctaccccgaccacatgaagcagcacgacttcttcaagtccgccatgcccgaaggctacgtccaggagcgcaccatcttcttcaaggacgacggcaactacaagacccgcgccgaggtgaagttcgagggcgacaccctggtgaaccgcatcgagctgaagggcatcgacttcaaggaggacggcaacatcctggggcacaagctggagtacaactacaacagccacaacgtctatatcatggccgacaagcagaagaacggcatcaaggtgaacttcaagatccgccacaacatcgaggacggcagcgtgcagctcgccgaccactaccagcagaacacccccatcggcgacggccccgtgctgctgcccgacaaccactacctgagcacccagtccgccctgagcaaagaccccaacgagaagcgcgatcacatggtcctgctggagttcgtgaccgccgccgggatcactctcggcatggacgagctgtacaagtaaaaaactgccatcagtcggcgtggactgtagaacactgccaatgccggtcccaagcccggataaaagtggagggtacagtccacgc

SEQ ID NO: 1376 - DNA, 1508 bp, synthetic construct
  source 1..1508: mol_type = other DNA
gccatcagtcgccggtcccaagcccggataaaatgggagggggcgggaaaccgcctaaccatgccgactgatggcagagcggccgcgtcgacgggcccgcggaattccgccccccccccctctccctcccccccccctaacgttactggccgaagccgcttggaataaggccggtgtgcgtttgtctatatgttattttccaccatattgccgtcttttggcaatgtgagggcccggaaacctggccctgtcttcttgacgagcattcctaggggtctttcccctctcgccaaaggaatgcaaggtctgttgaatgtcgtgaaggaagcagttcctctggaagcttcttgaagacaaacaacgtctgtagcgaccctttgcaggcagcggaaccccccacctggcgacaggtgcctctgcggccaaaagccacgtgtataagatacacctgcaaaggcggcacaaccccagtgccacgttgtgagttggatagttgtggaaagagtcaaatggctctcctcaagcgtattcaacaaggggctgaaggatgcccagaaggtaccccattgtatgggatctgatctggggcctcggtgcacatgctttacatgtgtttagtcgaggttaaaaaaacgtctaggccccccgaaccacggggacgtggttttcctttgaaaaacacgatgataatatggccacaaccatggtgagcaagggcgaggagctgttcaccggggtggtgcccatcctggtcgagctggacggcgacgtaaacggccacaagttcagcgtgtccggcgagggcgagggcgatgccacctacggcaagctgaccctgaagttcatctgcaccaccggcaagctgcccgtgccctggcccaccctcgtgaccaccctgacctacggcgtgcagtgcttcagccgctaccccgaccacatgaagcagcacgacttcttcaagtccgccatgcccgaaggctacgtccaggagcgcaccatcttcttcaaggacgacggcaactacaagacccgcgccgaggtgaagttcgagggcgacaccctggtgaaccgcatcgagctgaagggcatcgacttcaaggaggacggcaacatcctggggcacaagctggagtacaactacaacagccacaacgtctatatcatggccgacaagcagaagaacggcatcaaggtgaacttcaagatccgccacaacatcgaggacggcagcgtgcagctcgccgaccactaccagcagaacacccccatcggcgacggccccgtgctgctgcccgacaaccactacctgagcacccagtccgccctgagcaaagaccccaacgagaagcgcgatcacatggtcctgctggagttcgtgaccgccgccgggatcactctcggcatggacgagctgtacaagtaaaaaactgccatcagtcggcgtggactgtagaacactgccaatgccggtcccaagcccggataaaagtggagggtacagtccacgc

SEQ ID NO: 1377 - DNA, 1506 bp, synthetic construct
  source 1..1506: mol_type = other DNA
gccatcagtcgccggtcccaagcccggataaaatgggagggggcgggaaaccgcctaaccatgccgactgatggcagagcggccgcgtcgagggcccgcggaattccgccccccccccctctccctcccccccccctaacgttactggccgaagccgcttggaataaggccggtgtgcgtttgtctatatgttattttccaccatattgccgtcttttggcaatgtgagggcccggaaacctggccctgtcttcttgacgagcattcctaggggtctttcccctctcgccaaaggaatgcaaggtctgttgaatgtcgtgaaggaagcagttcctctggaagcttcttgaagacaaacaacgtctgtagcgaccctttgcaggcagcggaaccccccacctggcgacaggtgcctctgcggccaaaagccacgtgtataagatacacctgcaaaggcggcacaaccccagtgccacgttgtgagttggatagttgtggaaagagtcaaatggctctcctcaagcgtattcaacaaggggctgaaggatgcccagaaggtaccccattgtatgggatctgatctggggcctcggtgcacatgctttacatgtgtttagtcgaggttaaaaaacgtctaggccccccgaaccacggggacgtggttttcctttgaaaaacacgatgataatatggccacaaccatggtgagcaagggcgaggagctgttcaccggggtggtgcccatcctggtcgagctggacggcgacgtaaacggccacaagttcagcgtgtccggcgagggcgagggcgatgccacctacggcaagctgaccctgaagttcatctgcaccaccggcaagctgcccgtgccctggcccaccctcgtgaccaccctgacctacggcgtgcagtgcttcagccgctaccccgaccacatgaagcagcacgacttcttcaagtccgccatgcccgaaggctacgtccaggagcgcaccatcttcttcaaggacgacggcaactacaagacccgcgccgaggtgaagttcgagggcgacaccctggtgaaccgcatcgagctgaagggcatcgacttcaaggaggacggcaacatcctggggcacaagctggagtacaactacaacagccacaacgtctatatcatggccgacaagcagaagaacggcatcaaggtgaacttcaagatccgccacaacatcgaggacggcagcgtgcagctcgccgaccactaccagcagaacacccccatcggcgacggccccgtgctgctgcccgacaaccactacctgagcacccagtccgccctgagcaaagaccccaacgagaagcgcgatcacatggtcctgctggagttcgtgaccgccgccgggatcactctcggcatggacgagctgtacaagtaaaaaactgccatcagtcggcgtggactgtagaacactgccaatgccggtcccaagcccggataaaagtggagggtacagtccacgc

SEQ ID NO: 1378 - DNA, 1640 bp, synthetic construct
  source 1..1640: mol_type = other DNA
gccatcagtcgccggtcccaagcccggataaaatgggagggggcgggaaaccgcctaaccatgccgactgatggcagagcggccgcgtcgacttaaaacagctgtgggttgtcacccacccacagggtccactgggcgctagtacactggtatctcggtacctttgtacgcctgttttataccccctccctgatttgcaacttagaagcaacgcaaaccagatcaatagtaggtgtgacataccagtcgcatcttgatcaagcacttctgtatccccggaccgagtatcaatagactgtgcacacggttgaaggagaaaacgtccgttacccggctaactacttcgagaagcctagtaacgccattgaagttgcagagtgtttcgctcagcactccccccgtgtagatcaggtcgatgagtcaccgcattccccacgggcgaccgtggcggtggctgcgttggcggcctgcctatggggtaacccataggacgctctaatacggacatggcgtgaagagtctattgagctagttagtagtcctccggcccctgaatgcggctaatcctaactgcggagcacatacccttaatccaaagggcagtgtgtcgtaacgggcaactctgcagcggaaccgactactttgggtgtccgtgtttctttttattcttgtattggctgcttatggtgacaattaaagaattgttaccatatagctattggattggccatccagtgtcaaacagagctattgtatatctctttgttggattcacacctctcactcttgaaacgttacacaccctcaattacattatactgctgaacacgaagcgatggtgagcaagggcgaggagctgttcaccggggtggtgcccatcctggtcgagctggacggcgacgtaaacggccacaagttcagcgtgtccggcgagggcgagggcgatgccacctacggcaagctgaccctgaagttcatctgcaccaccggcaagctgcccgtgccctggcccaccctcgtgaccaccctgacctacggcgtgcagtgcttcagccgctaccccgaccacatgaagcagcacgacttcttcaagtccgccatgcccgaaggctacgtccaggagcgcaccatcttcttcaaggacgacggcaactacaagacccgcgccgaggtgaagttcgagggcgacaccctggtgaaccgcatcgagctgaagggcatcgacttcaaggaggacggcaacatcctggggcacaagctggagtacaactacaacagccacaacgtctatatcatggccgacaagcagaagaacggcatcaaggtgaacttcaagatccgccacaacatcgaggacggcagcgtgcagctcgccgaccactaccagcagaacacccccatcggcgacggccccgtgctgctgcccgacaaccactacctgagcacccagtccgccctgagcaaagaccccaacgagaagcgcgatcacatggtcctgctggagttcgtgaccgccgccgggatcactctcggcatggacgagctgtacaagtaaaaaactgccatcagtcggcgtggactgtagaacactgccaatgccggtcccaagcccggataaaagtggagggtacagtccacgc

SEQ ID NO: 1379 - DNA, 1638 bp, synthetic construct
  source 1..1638: mol_type = other DNA
gccatcagtcgccggtcccaagcccggataaaatgggagggggcgggaaaccgcctaaccatgccgactgatggcagagcggccgcgtcgacttaaaacagcctgtgggttgatcccacccacaggcccattgggcgctagcactctggtatcacggtacctttgtgcgcctgttttataccccctcccccaactgtaacttagaagtaacacacaccgatcaacagtcagcgtggcacaccagccacgttttgatcaagcacttctgttaccccggactgagtatcaatagactgctcacgcggttgaaggagaaagcgttcgttatccggccaactacttcgaaaaacctagtaacaccgtggaagttgcagagtgtttcgctcagcactaccccagtgtagatcaggtcgatgagtcaccgcattccccacgggcgaccgtggcggtggctgcgttggcggcctgcccatggggaaacccatgggacgctctaatacagacatggtgcgaagagtctattgagctagttggtagtcctccggcccctgaatgcggctaatcctaactgcggagcacacaccctcaagccagagggcagtgtgtcgtaacgggcaactctgcagcggaaccgactactttgggtgtccgtgtttcattttattcctatactggctgcttatggtgacaattgagagatcgttaccatatagctattggattggccatccggtgactaatagagctattatatatccctttgttgggtttataccacttagcttgaaagaggttaaaacattacaattcattgttaagttgaatacagcaaaatggtgagcaagggcgaggagctgttcaccggggtggtgcccatcctggtcgagctggacggcgacgtaaacggccacaagttcagcgtgtccggcgagggcgagggcgatgccacctacggcaagctgaccctgaagttcatctgcaccaccggcaagctgcccgtgccctggcccaccctcgtgaccaccctgacctacggcgtgcagtgcttcagccgctaccccgaccacatgaagcagcacgacttcttcaagtccgccatgcccgaaggctacgtccaggagcgcaccatcttcttcaaggacgacggcaactacaagacccgcgccgaggtgaagttcgagggcgacaccctggtgaaccgcatcgagctgaagggcatcgacttcaaggaggacggcaacatcctggggcacaagctggagtacaactacaacagccacaacgtctatatcatggccgacaagcagaagaacggcatcaaggtgaacttcaagatccgccacaacatcgaggacggcagcgtgcagctcgccgaccactaccagcagaacacccccatcggcgacggccccgtgctgctgcccgacaaccactacctgagcacccagtccgccctgagcaaagaccccaacgagaagcgcgatcacatggtcctgctggagttcgtgaccgccgccgggatcactctcggcatggacgagctgtacaagtaaaaaactgccatcagtcggcgtggactgtagaacactgccaatgccggtcccaagcccggataaaagtggagggtacagtccacgc

SEQ ID NO: 1380 - DNA, 2061 bp, synthetic construct
  source 1..2061: mol_type = other DNA
gccatcagtcgccggtcccaagcccggataaaatgggagggggcgggaaaccgcctaaccatgccgactgatggcagagcggccgcgtcgacgggcccgcggaattccgccccccccccctctccctcccccccccctaacgttactggccgaagccgcttggaataaggccggtgtgcgtttgtctatatgttattttccaccatattgccgtcttttggcaatgtgagggcccggaaacctggccctgtcttcttgacgagcattcctaggggtctttcccctctcgccaaaggaatgcaaggtctgttgaatgtcgtgaaggaagcagttcctctggaagcttcttgaagacaaacaacgtctgtagcgaccctttgcaggcagcggaaccccccacctggcgacaggtgcctctgcggccaaaagccacgtgtataagatacacctgcaaaggcggcacaaccccagtgccacgttgtgagttggatagttgtggaaagagtcaaatggctctcctcaagcgtattcaacaaggggctgaaggatgcccagaaggtaccccattgtatgggatctgatctggggcctcggtgcacatgctttacatgtgtttagtcgaggttaaaaaacgtctaggccccccgaaccacggggacgtggttttcctttgaaaaacacgatgataatatggccacaaccatggtgagcaagggcgaggagctgttcaccggggtggtgcccatcctggtcgagctggacggcgacgtaaacggccacaagttcagcgtgtccggcgagggcgagggcgatgccacctacggcaagctgaccctgaagttcatctgcaccaccggcaagctgcccgtgccctggcccaccctcgtgaccaccctgacctacggcgtgcagtgcttcagccgctaccccgaccacatgaagcagcacgacttcttcaagtccgccatgcccgaaggctacgtccaggagcgcaccatcttcttcaaggacgacggcaactacaagacccgcgccgaggtgaagttcgagggcgacaccctggtgaaccgcatcgagctgaagggcatcgacttcaaggaggacggcaacatcctggggcacaagctggagtacaactacaacagccacaacgtctatatcatggccgacaagcagaagaacggcatcaaggtgaacttcaagatccgccacaacatcgaggacggcagcgtgcagctcgccgaccactaccagcagaacacccccatcggcgacggccccgtgctgctgcccgacaaccactacctgagcacccagtccgccctgagcaaagaccccaacgagaagcgcgatcacatggtcctgctggagttcgtgaccgccgccgggatcactctcggcatggacgagctgtacaagtaaggatccaatcaacctctggattacaaaatttgtgaaagattgactggtattcttaactatgttgctccttttacgctatgtggatacgctgctttaatgcctttgtatcatgctattgcttcccgtatggctttcattttctcctccttgtataaatcctggttgctgtctctttatgaggagttgtggcccgttgtcaggcaacgtggcgtggtgtgcactgtgtttgctgacgcaacccccactggttggggcattgccaccacctgtcagctcctttccgggactttcgctttccccctccctattgccacggcggaactcatcgccgcctgccttgcccgctgctggacaggggctcggctgttgggcactgacaattccgtggtgttgtcggggaaatcatcgtcctttccttggctgctcgcctgtgttgccacctggattctgcgcgggacgtccttctgctacgtcccttcggccctcaatccagcggaccttccttcccgcggcctgctgccggctctgcggcctcttccgcgtcttcgaagtaaaaaactgccatcagtcggcgtggactgtagaacactgccaatgccggtcccaagcccggataaaagtggagggtacagtccacgc

SEQ ID NO: 1381 - DNA, 2107 bp, synthetic construct
  source 1..2107: mol_type = other DNA
gccatcagtcgccggtcccaagcccggataaaatgggagggggcgggaaaccgcctaaccatgccgactgatggcagagcggccgcgtcgacgggcccgcggaattccgccccccccccctctccctcccccccccctaacgttactggccgaagccgcttggaataaggccggtgtgcgtttgtctatatgttattttccaccatattgccgtcttttggcaatgtgagggcccggaaacctggccctgtcttcttgacgagcattcctaggggtctttcccctctcgccaaaggaatgcaaggtctgttgaatgtcgtgaaggaagcagttcctctggaagcttcttgaagacaaacaacgtctgtagcgaccctttgcaggcagcggaaccccccacctggcgacaggtgcctctgcggccaaaagccacgtgtataagatacacctgcaaaggcggcacaaccccagtgccacgttgtgagttggatagttgtggaaagagtcaaatggctctcctcaagcgtattcaacaaggggctgaaggatgcccagaaggtaccccattgtatgggatctgatctggggcctcggtgcacatgctttacatgtgtttagtcgaggttaaaaaacgtctaggccccccgaaccacggggacgtggttttcctttgaaaaacacgatgataatatggccacaaccatggtgagcaagggcgaggagctgttcaccggggtggtgcccatcctggtcgagctggacggcgacgtaaacggccacaagttcagcgtgtccggcgagggcgagggcgatgccacctacggcaagctgaccctgaagttcatctgcaccaccggcaagctgcccgtgccctggcccaccctcgtgaccaccctgacctacggcgtgcagtgcttcagccgctaccccgaccacatgaagcagcacgacttcttcaagtccgccatgcccgaaggctacgtccaggagcgcaccatcttcttcaaggacgacggcaactacaagacccgcgccgaggtgaagttcgagggcgacaccctggtgaaccgcatcgagctgaagggcatcgacttcaaggaggacggcaacatcctggggcacaagctggagtacaactacaacagccacaacgtctatatcatggccgacaagcagaagaacggcatcaaggtgaacttcaagatccgccacaacatcgaggacggcagcgtgcagctcgccgaccactaccagcagaacacccccatcggcgacggccccgtgctgctgcccgacaaccactacctgagcacccagtccgccctgagcaaagaccccaacgagaagcgcgatcacatggtcctgctggagttcgtgaccgccgccgggatcactctcggcatggacgagctgtacaagtaaggatccaatcaacctctggattacaaaatttgtgaaagattgactggtattcttaactatgttgctccttttacgctatgtggatacgctgctttaatgcctttgtatcatgctattgcttcccgtatggctttcattttctcctccttgtataaatcctggttgctgtctctttatgaggagttgtggcccgttgtcaggcaacgtggcgtggtgtgcactgtgtttgctgacgcaacccccactggttggggcattgccaccacctgtcagctcctttccgggactttcgctttccccctccctattgccacggcggaactcatcgccgcctgccttgcccgctgctggacaggggctcggctgttgggcactgacaattccgtggtgttgtcggggaaatcatcgtcctttccttggctgctcgcctgtgttgccacctggattctgcgcgggacgtccttctgctacgtcccttcggccctcaatccagcggaccttccttcccgcggcctgctgccggctctgcggcctcttccgcgtcttcgaagtaaaaaaaaaaaaaaaaaaaaaaaaaaaaaaaaaaaaaaaaaaaaaaaaaaaactgccatcagtcggcgtggactgtagaacactgccaatgccggtcccaagcccggataaaagtggagggtacagtccacgc

SEQ ID NO: 1382 - DNA, 2177 bp, synthetic construct
  source 1..2177: mol_type = other DNA
gccatcagtcgccggtcccaagcccggataaaatgggagggggcgggaaaccgcctaaccatgccgactgatggcagagcggccgcgtcgacgggcccgcggaattccgccccccccccctctccctcccccccccctaacgttactggccgaagccgcttggaataaggccggtgtgcgtttgtctatatgttattttccaccatattgccgtcttttggcaatgtgagggcccggaaacctggccctgtcttcttgacgagcattcctaggggtctttcccctctcgccaaaggaatgcaaggtctgttgaatgtcgtgaaggaagcagttcctctggaagcttcttgaagacaaacaacgtctgtagcgaccctttgcaggcagcggaaccccccacctggcgacaggtgcctctgcggccaaaagccacgtgtataagatacacctgcaaaggcggcacaaccccagtgccacgttgtgagttggatagttgtggaaagagtcaaatggctctcctcaagcgtattcaacaaggggctgaaggatgcccagaaggtaccccattgtatgggatctgatctggggcctcggtgcacatgctttacatgtgtttagtcgaggttaaaaaacgtctaggccccccgaaccacggggacgtggttttcctttgaaaaacacgatgataatatggccacaaccatggtgagcaagggcgaggagctgttcaccggggtggtgcccatcctggtcgagctggacggcgacgtaaacggccacaagttcagcgtgtccggcgagggcgagggcgatgccacctacggcaagctgaccctgaagttcatctgcaccaccggcaagctgcccgtgccctggcccaccctcgtgaccaccctgacctacggcgtgcagtgcttcagccgctaccccgaccacatgaagcagcacgacttcttcaagtccgccatgcccgaaggctacgtccaggagcgcaccatcttcttcaaggacgacggcaactacaagacccgcgccgaggtgaagttcgagggcgacaccctggtgaaccgcatcgagctgaagggcatcgacttcaaggaggacggcaacatcctggggcacaagctggagtacaactacaacagccacaacgtctatatcatggccgacaagcagaagaacggcatcaaggtgaacttcaagatccgccacaacatcgaggacggcagcgtgcagctcgccgaccactaccagcagaacacccccatcggcgacggccccgtgctgctgcccgacaaccactacctgagcacccagtccgccctgagcaaagaccccaacgagaagcgcgatcacatggtcctgctggagttcgtgaccgccgccgggatcactctcggcatggacgagctgtacaagtaaggatccaatcaacctctggattacaaaatttgtgaaagattgactggtattcttaactatgttgctccttttacgctatgtggatacgctgctttaatgcctttgtatcatgctattgcttcccgtatggctttcattttctcctccttgtataaatcctggttgctgtctctttatgaggagttgtggcccgttgtcaggcaacgtggcgtggtgtgcactgtgtttgctgacgcaacccccactggttggggcattgccaccacctgtcagctcctttccgggactttcgctttccccctccctattgccacggcggaactcatcgccgcctgccttgcccgctgctggacaggggctcggctgttgggcactgacaattccgtggtgttgtcggggaaatcatcgtcctttccttggctgctcgcctgtgttgccacctggattctgcgcgggacgtccttctgctacgtcccttcggccctcaatccagcggaccttccttcccgcggcctgctgccggctctgcggcctcttccgcgtcttcgaagtaaaaaaaaaaaaaaaaaaaaaaaaaaaaaaaaaaaaaaaaaaaaaaaaaaaaaaaaaaaaaaaaaaaaaaaaaaaaaaaaaaaaaaaaaaaaaaaaaaaaaaaaaaaaaaaaaaaaaaaaaactgccatcagtcggcgtggactgtagaacactgccaatgccggtcccaagcccggataaaagtggagggtacagtccacgc

SEQ ID NO: 1383 - DNA, 2222 bp, synthetic construct
  source 1..2222: mol_type = other DNA
gccatcagtcgccggtcccaagcccggataaaatgggagggggcgggaaaccgcctaaccatgccgactgatggcagagcggccgcgtcgacgggcccgcggaattccgccccccccccctctccctcccccccccctaacgttactggccgaagccgcttggaataaggccggtgtgcgtttgtctatatgttattttccaccatattgccgtcttttggcaatgtgagggcccggaaacctggccctgtcttcttgacgagcattcctaggggtctttcccctctcgccaaaggaatgcaaggtctgttgaatgtcgtgaaggaagcagttcctctggaagcttcttgaagacaaacaacgtctgtagcgaccctttgcaggcagcggaaccccccacctggcgacaggtgcctctgcggccaaaagccacgtgtataagatacacctgcaaaggcggcacaaccccagtgccacgttgtgagttggatagttgtggaaagagtcaaatggctctcctcaagcgtattcaacaaggggctgaaggatgcccagaaggtaccccattgtatgggatctgatctggggcctcggtgcacatgctttacatgtgtttagtcgaggttaaaaaacgtctaggccccccgaaccacggggacgtggttttcctttgaaaaacacgatgataatatggccacaaccatggtgagcaagggcgaggagctgttcaccggggtggtgcccatcctggtcgagctggacggcgacgtaaacggccacaagttcagcgtgtccggcgagggcgagggcgatgccacctacggcaagctgaccctgaagttcatctgcaccaccggcaagctgcccgtgccctggcccaccctcgtgaccaccctgacctacggcgtgcagtgcttcagccgctaccccgaccacatgaagcagcacgacttcttcaagtccgccatgcccgaaggctacgtccaggagcgcaccatcttcttcaaggacgacggcaactacaagacccgcgccgaggtgaagttcgagggcgacaccctggtgaaccgcatcgagctgaagggcatcgacttcaaggaggacggcaacatcctggggcacaagctggagtacaactacaacagccacaacgtctatatcatggccgacaagcagaagaacggcatcaaggtgaacttcaagatccgccacaacatcgaggacggcagcgtgcagctcgccgaccactaccagcagaacacccccatcggcgacggccccgtgctgctgcccgacaaccactacctgagcacccagtccgccctgagcaaagaccccaacgagaagcgcgatcacatggtcctgctggagttcgtgaccgccgccgggatcactctcggcatggacgagctgtacaagtaaggatccaatcaacctctggattacaaaatttgtgaaagattgactggtattcttaactatgttgctccttttacgctatgtggatacgctgctttaatgcctttgtatcatgctattgcttcccgtatggctttcattttctcctccttgtataaatcctggttgctgtctctttatgaggagttgtggcccgttgtcaggcaacgtggcgtggtgtgcactgtgtttgctgacgcaacccccactggttggggcattgccaccacctgtcagctcctttccgggactttcgctttccccctccctattgccacggcggaactcatcgccgcctgccttgcccgctgctggacaggggctcggctgttgggcactgacaattccgtggtgttgtcggggaaatcatcgtcctttccttggctgctcgcctgtgttgccacctggattctgcgcgggacgtccttctgctacgtcccttcggccctcaatccagcggaccttccttcccgcggcctgctgccggctctgcggcctcttccgcgtcttcgaagtaaaaaaaaaaaaaaaaaaaaaaaaaaaaaaaaaaaaaaaaaaaaaaaaaaaaaaaaaaaaaaaaaaaaaaaaaaaaaaaaaaaaaaaaaaaaaaaaaaaaaaaaaaaaaaaaaaaaaaaaaaaaaaaaaaaaaaaaaaaaaaaaaaaaaaaaaaaaaaaaaaaaaaactgccatcagtcggcgtggactgtagaacactgccaatgccggtcccaagcccggataaaagtggagggtacagtccacgc

SEQ ID NO: 1384 - DNA, 2528 bp, synthetic construct
  source 1..2528: mol_type = other DNA
gccatcagtcgccggtcccaagcccggataaaatgggagggggcgggaaaccgcctaaccatgccgactgatggcagagcggccgcgtcgacgggcccgcggaattccgccccccccccctctccctcccccccccctaacgttactggccgaagccgcttggaataaggccggtgtgcgtttgtctatatgttattttccaccatattgccgtcttttggcaatgtgagggcccggaaacctggccctgtcttcttgacgagcattcctaggggtctttcccctctcgccaaaggaatgcaaggtctgttgaatgtcgtgaaggaagcagttcctctggaagcttcttgaagacaaacaacgtctgtagcgaccctttgcaggcagcggaaccccccacctggcgacaggtgcctctgcggccaaaagccacgtgtataagatacacctgcaaaggcggcacaaccccagtgccacgttgtgagttggatagttgtggaaagagtcaaatggctctcctcaagcgtattcaacaaggggctgaaggatgcccagaaggtaccccattgtatgggatctgatctggggcctcggtgcacatgctttacatgtgtttagtcgaggttaaaaaacgtctaggccccccgaaccacggggacgtggttttcctttgaaaaacacgatgataatatggccacaaccatggtgagcaagggcgaggagctgttcaccggggtggtgcccatcctggtcgagctggacggcgacgtaaacggccacaagttcagcgtgtccggcgagggcgagggcgatgccacctacggcaagctgaccctgaagttcatctgcaccaccggcaagctgcccgtgccctggcccaccctcgtgaccaccctgacctacggcgtgcagtgcttcagccgctaccccgaccacatgaagcagcacgacttcttcaagtccgccatgcccgaaggctacgtccaggagcgcaccatcttcttcaaggacgacggcaactacaagacccgcgccgaggtgaagttcgagggcgacaccctggtgaaccgcatcgagctgaagggcatcgacttcaaggaggacggcaacatcctggggcacaagctggagtacaactacaacagccacaacgtctatatcatggccgacaagcagaagaacggcatcaaggtgaacttcaagatccgccacaacatcgaggacggcagcgtgcagctcgccgaccactaccagcagaacacccccatcggcgacggccccgtgctgctgcccgacaaccactacctgagcacccagtccgccctgagcaaagaccccaacgagaagcgcgatcacatggtcctgctggagttcgtgaccgccgccgggatcactctcggcatggacgagctgtacaagtaaggatccaatcaacctctggattacaaaatttgtgaaagattgactggtattcttaactatgttgctccttttacgctatgtggatacgctgctttaatgcctttgtatcatgctattgcttcccgtatggctttcattttctcctccttgtataaatcctggttgctgtctctttatgaggagttgtggcccgttgtcaggcaacgtggcgtggtgtgcactgtgtttgctgacgcaacccccactggttggggcattgccaccacctgtcagctcctttccgggactttcgctttccccctccctattgccacggcggaactcatcgccgcctgccttgcccgctgctggacaggggctcggctgttgggcactgacaattccgtggtgttgtcggggaaatcatcgtcctttccttggctgctcgcctgtgttgccacctggattctgcgcgggacgtccttctgctacgtcccttcggccctcaatccagcggaccttccttcccgcggcctgctgccggctctgcggcctcttccgcgtcttcgaacaagcacgcagcaatgcagctcaaaacgcttagcctagccacacccccacgggaaacagcagtgattaacctttagcaataaacgaaagtttaactaagctatactaaccccagggttggtcaatttcgtgccagccacaccctggtactgcatgcacgcaatgctagctgcccctttcccgtcctgggtaccccgagtctcccccgacctcgggtcccaggtatgctcccacctccacctgccccactcaccacctctgctagttccagacacctcccgaaacacacacacacacacacaccgaagtaaaaaaaaaaaaaaaaaaaaaaaaaaaaaaaaaaaaaaaaaaaaaaaaaaaaaaaaaaaaaaaaaaaaaaaaaaaaaaaaaaaaaaaaaaaaaaaaaaaaaaaaaaaaaaaaaaaaaaaaaaaaaaaaaaaaaaaaaaaaaaaaaaaaaaaaaaaaaaaaaaaaaaactgccatcagtcggcgtggactgtagaacactgccaatgccggtcccaagcccggataaaagtggagggtacagtccacgc

SEQ ID NO: 1385 - DNA, 2541 bp, synthetic construct
  source 1..2541: mol_type = other DNA
gccatcagtcgccggtcccaagcccggataaaatgggagggggcgggaaaccgcctaaccatgccgactgatggcagagcggccgcgtcgacgggcccgcggaattccgccccccccccctctccctcccccccccctaacgttactggccgaagccgcttggaataaggccggtgtgcgtttgtctatatgttattttccaccatattgccgtcttttggcaatgtgagggcccggaaacctggccctgtcttcttgacgagcattcctaggggtctttcccctctcgccaaaggaatgcaaggtctgttgaatgtcgtgaaggaagcagttcctctggaagcttcttgaagacaaacaacgtctgtagcgaccctttgcaggcagcggaaccccccacctggcgacaggtgcctctgcggccaaaagccacgtgtataagatacacctgcaaaggcggcacaaccccagtgccacgttgtgagttggatagttgtggaaagagtcaaatggctctcctcaagcgtattcaacaaggggctgaaggatgcccagaaggtaccccattgtatgggatctgatctggggcctcggtgcacatgctttacatgtgtttagtcgaggttaaaaaacgtctaggccccccgaaccacggggacgtggttttcctttgaaaaacacgatgataatatggccacaaccatggtgagcaagggcgaggagctgttcaccggggtggtgcccatcctggtcgagctggacggcgacgtaaacggccacaagttcagcgtgtccggcgagggcgagggcgatgccacctacggcaagctgaccctgaagttcatctgcaccaccggcaagctgcccgtgccctggcccaccctcgtgaccaccctgacctacggcgtgcagtgcttcagccgctaccccgaccacatgaagcagcacgacttcttcaagtccgccatgcccgaaggctacgtccaggagcgcaccatcttcttcaaggacgacggcaactacaagacccgcgccgaggtgaagttcgagggcgacaccctggtgaaccgcatcgagctgaagggcatcgacttcaaggaggacggcaacatcctggggcacaagctggagtacaactacaacagccacaacgtctatatcatggccgacaagcagaagaacggcatcaaggtgaacttcaagatccgccacaacatcgaggacggcagcgtgcagctcgccgaccactaccagcagaacacccccatcggcgacggccccgtgctgctgcccgacaaccactacctgagcacccagtccgccctgagcaaagaccccaacgagaagcgcgatcacatggtcctgctggagttcgtgaccgccgccgggatcactctcggcatggacgagctgtacaagtaaggatccaatcaacctctggattacaaaatttgtgaaagattgactggtattcttaactatgttgctccttttacgctatgtggatacgctgctttaatgcctttgtatcatgctattgcttcccgtatggctttcattttctcctccttgtataaatcctggttgctgtctctttatgaggagttgtggcccgttgtcaggcaacgtggcgtggtgtgcactgtgtttgctgacgcaacccccactggttggggcattgccaccacctgtcagctcctttccgggactttcgctttccccctccctattgccacggcggaactcatcgccgcctgccttgcccgctgctggacaggggctcggctgttgggcactgacaattccgtggtgttgtcggggaaatcatcgtcctttccttggctgctcgcctgtgttgccacctggattctgcgcgggacgtccttctgctacgtcccttcggccctcaatccagcggaccttccttcccgcggcctgctgccggctctgcggcctcttccgcgtcttcgaacaagcacgcagcaatgcagctcaaaacgcttagcctagccacacccccacgggaaacagcagtgattaacctttagcaataaacgaaagtttaactaagctatactaaccccagggttggtcaatttcgtgccagccacaccttccagccagacacccgccccccggccctggctaagaagttgcttcctgttgccagcatgacctaccctcgcctctttgatgccatccgctgccacctccttttgctcctggaccctttagcctctctgcccttccactctctgacccccgaaacacacacacacacacacaccgaagtaaaaaaaaaaaaaaaaaaaaaaaaaaaaaaaaaaaaaaaaaaaaaaaaaaaaaaaaaaaaaaaaaaaaaaaaaaaaaaaaaaaaaaaaaaaaaaaaaaaaaaaaaaaaaaaaaaaaaaaaaaaaaaaaaaaaaaaaaaaaaaaaaaaaaaaaaaaaaaaaaaaaaaactgccatcagtcggcgtggactgtagaacactgccaatgccggtcccaagcccggataaaagtggagggtacagtccacgc

SEQ ID NO: 1386 - DNA, 2528 bp, synthetic construct
  source 1..2528: mol_type = other DNA
gccatcagtcgccggtcccaagcccggataaaatgggagggggcgggaaaccgcctaaccatgccgactgatggcagagcggccgcgtcgacgggcccgcggaattccgccccccccccctctccctcccccccccctaacgttactggccgaagccgcttggaataaggccggtgtgcgtttgtctatatgttattttccaccatattgccgtcttttggcaatgtgagggcccggaaacctggccctgtcttcttgacgagcattcctaggggtctttcccctctcgccaaaggaatgcaaggtctgttgaatgtcgtgaaggaagcagttcctctggaagcttcttgaagacaaacaacgtctgtagcgaccctttgcaggcagcggaaccccccacctggcgacaggtgcctctgcggccaaaagccacgtgtataagatacacctgcaaaggcggcacaaccccagtgccacgttgtgagttggatagttgtggaaagagtcaaatggctctcctcaagcgtattcaacaaggggctgaaggatgcccagaaggtaccccattgtatgggatctgatctggggcctcggtgcacatgctttacatgtgtttagtcgaggttaaaaaacgtctaggccccccgaaccacggggacgtggttttcctttgaaaaacacgatgataatatggccacaaccatggtgagcaagggcgaggagctgttcaccggggtggtgcccatcctggtcgagctggacggcgacgtaaacggccacaagttcagcgtgtccggcgagggcgagggcgatgccacctacggcaagctgaccctgaagttcatctgcaccaccggcaagctgcccgtgccctggcccaccctcgtgaccaccctgacctacggcgtgcagtgcttcagccgctaccccgaccacatgaagcagcacgacttcttcaagtccgccatgcccgaaggctacgtccaggagcgcaccatcttcttcaaggacgacggcaactacaagacccgcgccgaggtgaagttcgagggcgacaccctggtgaaccgcatcgagctgaagggcatcgacttcaaggaggacggcaacatcctggggcacaagctggagtacaactacaacagccacaacgtctatatcatggccgacaagcagaagaacggcatcaaggtgaacttcaagatccgccacaacatcgaggacggcagcgtgcagctcgccgaccactaccagcagaacacccccatcggcgacggccccgtgctgctgcccgacaaccactacctgagcacccagtccgccctgagcaaagaccccaacgagaagcgcgatcacatggtcctgctggagttcgtgaccgccgccgggatcactctcggcatggacgagctgtacaagtaaggatccaatcaacctctggattacaaaatttgtgaaagattgactggtattcttaactatgttgctccttttacgctatgtggatacgctgctttaatgcctttgtatcatgctattgcttcccgtatggctttcattttctcctccttgtataaatcctggttgctgtctctttatgaggagttgtggcccgttgtcaggcaacgtggcgtggtgtgcactgtgtttgctgacgcaacccccactggttggggcattgccaccacctgtcagctcctttccgggactttcgctttccccctccctattgccacggcggaactcatcgccgcctgccttgcccgctgctggacaggggctcggctgttgggcactgacaattccgtggtgttgtcggggaaatcatcgtcctttccttggctgctcgcctgtgttgccacctggattctgcgcgggacgtccttctgctacgtcccttcggccctcaatccagcggaccttccttcccgcggcctgctgccggctctgcggcctcttccgcgtcttcgaactggtactgcatgcacgcaatgctagctgcccctttcccgtcctgggtaccccgagtctcccccgacctcgggtcccaggtatgctcccacctccacctgccccactcaccacctctgctagttccagacacctcccaagcacgcagcaatgcagctcaaaacgcttagcctagccacacccccacgggaaacagcagtgattaacctttagcaataaacgaaagtttaactaagctatactaaccccagggttggtcaatttcgtgccagccacacccgaaacacacacacacacacacaccgaagtaaaaaaaaaaaaaaaaaaaaaaaaaaaaaaaaaaaaaaaaaaaaaaaaaaaaaaaaaaaaaaaaaaaaaaaaaaaaaaaaaaaaaaaaaaaaaaaaaaaaaaaaaaaaaaaaaaaaaaaaaaaaaaaaaaaaaaaaaaaaaaaaaaaaaaaaaaaaaaaaaaaaaaactgccatcagtcggcgtggactgtagaacactgccaatgccggtcccaagcccggataaaagtggagggtacagtccacgc

SEQ ID NO: 1387 - DNA, 2528 bp, synthetic construct
  source 1..2528: mol_type = other DNA
gccatcagtcgccggtcccaagcccggataaaatgggagggggcgggaaaccgcctaaccatgccgactgatggcagagcggccgcgtcgacgggcccgcggaattccgccccccccccctctccctcccccccccctaacgttactggccgaagccgcttggaataaggccggtgtgcgtttgtctatatgttattttccaccatattgccgtcttttggcaatgtgagggcccggaaacctggccctgtcttcttgacgagcattcctaggggtctttcccctctcgccaaaggaatgcaaggtctgttgaatgtcgtgaaggaagcagttcctctggaagcttcttgaagacaaacaacgtctgtagcgaccctttgcaggcagcggaaccccccacctggcgacaggtgcctctgcggccaaaagccacgtgtataagatacacctgcaaaggcggcacaaccccagtgccacgttgtgagttggatagttgtggaaagagtcaaatggctctcctcaagcgtattcaacaaggggctgaaggatgcccagaaggtaccccattgtatgggatctgatctggggcctcggtgcacatgctttacatgtgtttagtcgaggttaaaaaacgtctaggccccccgaaccacggggacgtggttttcctttgaaaaacacgatgataatatggccacaaccatggtgagcaagggcgaggagctgttcaccggggtggtgcccatcctggtcgagctggacggcgacgtaaacggccacaagttcagcgtgtccggcgagggcgagggcgatgccacctacggcaagctgaccctgaagttcatctgcaccaccggcaagctgcccgtgccctggcccaccctcgtgaccaccctgacctacggcgtgcagtgcttcagccgctaccccgaccacatgaagcagcacgacttcttcaagtccgccatgcccgaaggctacgtccaggagcgcaccatcttcttcaaggacgacggcaactacaagacccgcgccgaggtgaagttcgagggcgacaccctggtgaaccgcatcgagctgaagggcatcgacttcaaggaggacggcaacatcctggggcacaagctggagtacaactacaacagccacaacgtctatatcatggccgacaagcagaagaacggcatcaaggtgaacttcaagatccgccacaacatcgaggacggcagcgtgcagctcgccgaccactaccagcagaacacccccatcggcgacggccccgtgctgctgcccgacaaccactacctgagcacccagtccgccctgagcaaagaccccaacgagaagcgcgatcacatggtcctgctggagttcgtgaccgccgccgggatcactctcggcatggacgagctgtacaagtaaggatccaatcaacctctggattacaaaatttgtgaaagattgactggtattcttaactatgttgctccttttacgctatgtggatacgctgctttaatgcctttgtatcatgctattgcttcccgtatggctttcattttctcctccttgtataaatcctggttgctgtctctttatgaggagttgtggcccgttgtcaggcaacgtggcgtggtgtgcactgtgtttgctgacgcaacccccactggttggggcattgccaccacctgtcagctcctttccgggactttcgctttccccctccctattgccacggcggaactcatcgccgcctgccttgcccgctgctggacaggggctcggctgttgggcactgacaattccgtggtgttgtcggggaaatcatcgtcctttccttggctgctcgcctgtgttgccacctggattctgcgcgggacgtccttctgctacgtcccttcggccctcaatccagcggaccttccttcccgcggcctgctgccggctctgcggcctcttccgcgtcttcgaactggtactgcatgcacgcaatgctagctgcccctttcccgtcctgggtaccccgagtctcccccgacctcgggtcccaggtatgctcccacctccacctgccccactcaccacctctgctagttccagacacctccgagagctcgctttcttgctgtccaatttctattaaaggttcctttgttccctaagtccaactactaaactgggggatattatgaagggccttgagcatctggattctgcctaataaaaaacatttattttcattgctgcgtccgaaacacacacacacacacacaccgaagtaaaaaaaaaaaaaaaaaaaaaaaaaaaaaaaaaaaaaaaaaaaaaaaaaaaaaaaaaaaaaaaaaaaaaaaaaaaaaaaaaaaaaaaaaaaaaaaaaaaaaaaaaaaaaaaaaaaaaaaaaaaaaaaaaaaaaaaaaaaaaaaaaaaaaaaaaaaaaaaaaaaaaaactgccatcagtcggcgtggactgtagaacactgccaatgccggtcccaagcccggataaaagtggagggtacagtccacgc

SEQ ID NO: 1388 - DNA, 2535 bp, synthetic construct
  source 1..2535: mol_type = other DNA
gccatcagtcgccggtcccaagcccggataaaatgggagggggcgggaaaccgcctaaccatgccgactgatggcagagcggccgcgtcgacgggcccgcggaattccgccccccccccctctccctcccccccccctaacgttactggccgaagccgcttggaataaggccggtgtgcgtttgtctatatgttattttccaccatattgccgtcttttggcaatgtgagggcccggaaacctggccctgtcttcttgacgagcattcctaggggtctttcccctctcgccaaaggaatgcaaggtctgttgaatgtcgtgaaggaagcagttcctctggaagcttcttgaagacaaacaacgtctgtagcgaccctttgcaggcagcggaaccccccacctggcgacaggtgcctctgcggccaaaagccacgtgtataagatacacctgcaaaggcggcacaaccccagtgccacgttgtgagttggatagttgtggaaagagtcaaatggctctcctcaagcgtattcaacaaggggctgaaggatgcccagaaggtaccccattgtatgggatctgatctggggcctcggtgcacatgctttacatgtgtttagtcgaggttaaaaaacgtctaggccccccgaaccacggggacgtggttttcctttgaaaaacacgatgataatatggccacaaccatggtgagcaagggcgaggagctgttcaccggggtggtgcccatcctggtcgagctggacggcgacgtaaacggccacaagttcagcgtgtccggcgagggcgagggcgatgccacctacggcaagctgaccctgaagttcatctgcaccaccggcaagctgcccgtgccctggcccaccctcgtgaccaccctgacctacggcgtgcagtgcttcagccgctaccccgaccacatgaagcagcacgacttcttcaagtccgccatgcccgaaggctacgtccaggagcgcaccatcttcttcaaggacgacggcaactacaagacccgcgccgaggtgaagttcgagggcgacaccctggtgaaccgcatcgagctgaagggcatcgacttcaaggaggacggcaacatcctggggcacaagctggagtacaactacaacagccacaacgtctatatcatggccgacaagcagaagaacggcatcaaggtgaacttcaagatccgccacaacatcgaggacggcagcgtgcagctcgccgaccactaccagcagaacacccccatcggcgacggccccgtgctgctgcccgacaaccactacctgagcacccagtccgccctgagcaaagaccccaacgagaagcgcgatcacatggtcctgctggagttcgtgaccgccgccgggatcactctcggcatggacgagctgtacaagtaaggatccaatcaacctctggattacaaaatttgtgaaagattgactggtattcttaactatgttgctccttttacgctatgtggatacgctgctttaatgcctttgtatcatgctattgcttcccgtatggctttcattttctcctccttgtataaatcctggttgctgtctctttatgaggagttgtggcccgttgtcaggcaacgtggcgtggtgtgcactgtgtttgctgacgcaacccccactggttggggcattgccaccacctgtcagctcctttccgggactttcgctttccccctccctattgccacggcggaactcatcgccgcctgccttgcccgctgctggacaggggctcggctgttgggcactgacaattccgtggtgttgtcggggaaatcatcgtcctttccttggctgctcgcctgtgttgccacctggattctgcgcgggacgtccttctgctacgtcccttcggccctcaatccagcggaccttccttcccgcggcctgctgccggctctgcggcctcttccgcgtcttcgaatgcccgtcctcaccaagactgactgcctgctgctttgctactgcccgggcccatgagactgacttcccactgctctgcctgcctctccccactgcactggcacagccccgccttgccgctgctgatccattgccggtgtgaccgagagctcgctttcttgctgtccaatttctattaaaggttcctttgttccctaagtccaactactaaactgggggatattatgaagggccttgagcatctggattctgcctaataaaaaacatttattttcattgctgcgtccgaaacacacacacacacacacaccgaagtaaaaaaaaaaaaaaaaaaaaaaaaaaaaaaaaaaaaaaaaaaaaaaaaaaaaaaaaaaaaaaaaaaaaaaaaaaaaaaaaaaaaaaaaaaaaaaaaaaaaaaaaaaaaaaaaaaaaaaaaaaaaaaaaaaaaaaaaaaaaaaaaaaaaaaaaaaaaaaaaaaaaaaactgccatcagtcggcgtggactgtagaacactgccaatgccggtcccaagcccggataaaagtggagggtacagtccacgc

SEQ ID NO: 1389 - DNA, 2534 bp, synthetic construct
  source 1..2534: mol_type = other DNA
gccatcagtcgccggtcccaagcccggataaaatgggagggggcgggaaaccgcctaaccatgccgactgatggcagagcggccgcgtcgacgggcccgcggaattccgccccccccccctctccctcccccccccctaacgttactggccgaagccgcttggaataaggccggtgtgcgtttgtctatatgttattttccaccatattgccgtcttttggcaatgtgagggcccggaaacctggccctgtcttcttgacgagcattcctaggggtctttcccctctcgccaaaggaatgcaaggtctgttgaatgtcgtgaaggaagcagttcctctggaagcttcttgaagacaaacaacgtctgtagcgaccctttgcaggcagcggaaccccccacctggcgacaggtgcctctgcggccaaaagccacgtgtataagatacacctgcaaaggcggcacaaccccagtgccacgttgtgagttggatagttgtggaaagagtcaaatggctctcctcaagcgtattcaacaaggggctgaaggatgcccagaaggtaccccattgtatgggatctgatctggggcctcggtgcacatgctttacatgtgtttagtcgaggttaaaaaacgtctaggccccccgaaccacggggacgtggttttcctttgaaaaacacgatgataatatggccacaaccatggtgagcaagggcgaggagctgttcaccggggtggtgcccatcctggtcgagctggacggcgacgtaaacggccacaagttcagcgtgtccggcgagggcgagggcgatgccacctacggcaagctgaccctgaagttcatctgcaccaccggcaagctgcccgtgccctggcccaccctcgtgaccaccctgacctacggcgtgcagtgcttcagccgctaccccgaccacatgaagcagcacgacttcttcaagtccgccatgcccgaaggctacgtccaggagcgcaccatcttcttcaaggacgacggcaactacaagacccgcgccgaggtgaagttcgagggcgacaccctggtgaaccgcatcgagctgaagggcatcgacttcaaggaggacggcaacatcctggggcacaagctggagtacaactacaacagccacaacgtctatatcatggccgacaagcagaagaacggcatcaaggtgaacttcaagatccgccacaacatcgaggacggcagcgtgcagctcgccgaccactaccagcagaacacccccatcggcgacggccccgtgctgctgcccgacaaccactacctgagcacccagtccgccctgagcaaagaccccaacgagaagcgcgatcacatggtcctgctggagttcgtgaccgccgccgggatcactctcggcatggacgagctgtacaagtaaggatccaatcaacctctggattacaaaatttgtgaaagattgactggtattcttaactatgttgctccttttacgctatgtggatacgctgctttaatgcctttgtatcatgctattgcttcccgtatggctttcattttctcctccttgtataaatcctggttgctgtctctttatgaggagttgtggcccgttgtcaggcaacgtggcgtggtgtgcactgtgtttgctgacgcaacccccactggttggggcattgccaccacctgtcagctcctttccgggactttcgctttccccctccctattgccacggcggaactcatcgccgcctgccttgcccgctgctggacaggggctcggctgttgggcactgacaattccgtggtgttgtcggggaaatcatcgtcctttccttggctgctcgcctgtgttgccacctggattctgcgcgggacgtccttctgctacgtcccttcggccctcaatccagcggaccttccttcccgcggcctgctgccggctctgcggcctcttccgcgtcttcgaagagagctcgctttcttgctgtccaatttctattaaaggttcctttgttccctaagtccaactactaaactgggggatattatgaagggccttgagcatctggattctgcctaataaaaaacatttattttcattgctgcgtcgagagctcgctttcttgctgtccaatttctattaaaggttcctttgttccctaagtccaactactaaactgggggatattatgaagggccttgagcatctggattctgcctaataaaaaacatttattttcattgctgcgtccgaaacacacacacacacacacaccgaagtaaaaaaaaaaaaaaaaaaaaaaaaaaaaaaaaaaaaaaaaaaaaaaaaaaaaaaaaaaaaaaaaaaaaaaaaaaaaaaaaaaaaaaaaaaaaaaaaaaaaaaaaaaaaaaaaaaaaaaaaaaaaaaaaaaaaaaaaaaaaaaaaaaaaaaaaaaaaaaaaaaaaaaactgccatcagtcggcgtggactgtagaacactgccaatgccggtcccaagcccggataaaagtggagggtacagtccacgc

SEQ ID NO: 1390 - DNA, 2361 bp, synthetic construct
  source 1..2361: mol_type = other DNA
gccatcagtcgccggtcccaagcccggataaaatgggagggggcgggaaaccgcctaaccatgccgactgatggcagagcggccgcgtcgacgggcccgcggaattccgccccccccccctctccctcccccccccctaacgttactggccgaagccgcttggaataaggccggtgtgcgtttgtctatatgttattttccaccatattgccgtcttttggcaatgtgagggcccggaaacctggccctgtcttcttgacgagcattcctaggggtctttcccctctcgccaaaggaatgcaaggtctgttgaatgtcgtgaaggaagcagttcctctggaagcttcttgaagacaaacaacgtctgtagcgaccctttgcaggcagcggaaccccccacctggcgacaggtgcctctgcggccaaaagccacgtgtataagatacacctgcaaaggcggcacaaccccagtgccacgttgtgagttggatagttgtggaaagagtcaaatggctctcctcaagcgtattcaacaaggggctgaaggatgcccagaaggtaccccattgtatgggatctgatctggggcctcggtgcacatgctttacatgtgtttagtcgaggttaaaaaacgtctaggccccccgaaccacggggacgtggttttcctttgaaaaacacgatgataatatggccacaaccatggtgagcaagggcgaggagctgttcaccggggtggtgcccatcctggtcgagctggacggcgacgtaaacggccacaagttcagcgtgtccggcgagggcgagggcgatgccacctacggcaagctgaccctgaagttcatctgcaccaccggcaagctgcccgtgccctggcccaccctcgtgaccaccctgacctacggcgtgcagtgcttcagccgctaccccgaccacatgaagcagcacgacttcttcaagtccgccatgcccgaaggctacgtccaggagcgcaccatcttcttcaaggacgacggcaactacaagacccgcgccgaggtgaagttcgagggcgacaccctggtgaaccgcatcgagctgaagggcatcgacttcaaggaggacggcaacatcctggggcacaagctggagtacaactacaacagccacaacgtctatatcatggccgacaagcagaagaacggcatcaaggtgaacttcaagatccgccacaacatcgaggacggcagcgtgcagctcgccgaccactaccagcagaacacccccatcggcgacggccccgtgctgctgcccgacaaccactacctgagcacccagtccgccctgagcaaagaccccaacgagaagcgcgatcacatggtcctgctggagttcgtgaccgccgccgggatcactctcggcatggacgagctgtacaagtaaggatccaatcaacctctggattacaaaatttgtgaaagattgactggtattcttaactatgttgctccttttacgctatgtggatacgctgctttaatgcctttgtatcatgctattgcttcccgtatggctttcattttctcctccttgtataaatcctggttgctgtctctttatgaggagttgtggcccgttgtcaggcaacgtggcgtggtgtgcactgtgtttgctgacgcaacccccactggttggggcattgccaccacctgtcagctcctttccgggactttcgctttccccctccctattgccacggcggaactcatcgccgcctgccttgcccgctgctggacaggggctcggctgttgggcactgacaattccgtggtgttgtcggggaaatcatcgtcctttccttggctgctcgcctgtgttgccacctggattctgcgcgggacgtccttctgctacgtcccttcggccctcaatccagcggaccttccttcccgcggcctgctgccggctctgcggcctcttccgcgtcttcgaagctggagcctcggtggcctagcttcttgccccttgggcctccccccagcccctcctccccttcctgcacccgtacccccgtggtctttgaataaagtctgagtgggcggcacgaaacacacacacacacacacaccgaagtaaaaaaaaaaaaaaaaaaaaaaaaaaaaaaaaaaaaaaaaaaaaaaaaaaaaaaaaaaaaaaaaaaaaaaaaaaaaaaaaaaaaaaaaaaaaaaaaaaaaaaaaaaaaaaaaaaaaaaaaaaaaaaaaaaaaaaaaaaaaaaaaaaaaaaaaaaaaaaaaaaaaaaactgccatcagtcggcgtggactgtagaacactgccaatgccggtcccaagcccggataaaagtggagggtacagtccacgc

SEQ ID NO: 1391 - DNA, 2369 bp, synthetic construct
  source 1..2369: mol_type = other DNA
gccatcagtcgccggtcccaagcccggataaaatgggagggggcgggaaaccgcctaaccatgccgactgatggcagagcggccgcgtcgacgggcccgcggaattccttaaaacagcctgtgggttgatcccacccacaggcccattgggcgctagcactctggtatcacggtacctttgtgcgcctgttttataccccctcccccaactgtaacttagaagtaacacacaccgatcaacagtcagcgtggcacaccagccacgttttgatcaagcacttctgttaccccggactgagtatcaatagactgctcacgcggttgaaggagaaagcgttcgttatccggccaactacttcgaaaaacctagtaacaccgtggaagttgcagagtgtttcgctcagcactaccccagtgtagatcaggtcgatgagtcaccgcattccccacgggcgaccgtggcggtggctgcgttggcggcctgcccatggggaaacccatgggacgctctaatacagacatggtgcgaagagtctattgagctagttggtagtcctccggcccctgaatgcggctaatcctaactgcggagcacacaccctcaagccagagggcagtgtgtcgtaacgggcaactctgcagcggaaccgactactttgggtgtccgtgtttcattttattcctatactggctgcttatggtgacaattgagagatcgttaccatatagctattggattggccatccggtgactaatagagctattatatatccctttgttgggtttataccacttagcttgaaagaggttaaaacattacaattcattgttaagttgaatacagcaaaatggtgagcaagggcgaggagctgttcaccggggtggtgcccatcctggtcgagctggacggcgacgtaaacggccacaagttcagcgtgtccggcgagggcgagggcgatgccacctacggcaagctgaccctgaagttcatctgcaccaccggcaagctgcccgtgccctggcccaccctcgtgaccaccctgacctacggcgtgcagtgcttcagccgctaccccgaccacatgaagcagcacgacttcttcaagtccgccatgcccgaaggctacgtccaggagcgcaccatcttcttcaaggacgacggcaactacaagacccgcgccgaggtgaagttcgagggcgacaccctggtgaaccgcatcgagctgaagggcatcgacttcaaggaggacggcaacatcctggggcacaagctggagtacaactacaacagccacaacgtctatatcatggccgacaagcagaagaacggcatcaaggtgaacttcaagatccgccacaacatcgaggacggcagcgtgcagctcgccgaccactaccagcagaacacccccatcggcgacggccccgtgctgctgcccgacaaccactacctgagcacccagtccgccctgagcaaagaccccaacgagaagcgcgatcacatggtcctgctggagttcgtgaccgccgccgggatcactctcggcatggacgagctgtacaagtaaggatccaatcaacctctggattacaaaatttgtgaaagattgactggtattcttaactatgttgctccttttacgctatgtggatacgctgctttaatgcctttgtatcatgctattgcttcccgtatggctttcattttctcctccttgtataaatcctggttgctgtctctttatgaggagttgtggcccgttgtcaggcaacgtggcgtggtgtgcactgtgtttgctgacgcaacccccactggttggggcattgccaccacctgtcagctcctttccgggactttcgctttccccctccctattgccacggcggaactcatcgccgcctgccttgcccgctgctggacaggggctcggctgttgggcactgacaattccgtggtgttgtcggggaaatcatcgtcctttccttggctgctcgcctgtgttgccacctggattctgcgcgggacgtccttctgctacgtcccttcggccctcaatccagcggaccttccttcccgcggcctgctgccggctctgcggcctcttccgcgtcttcgaagtaaaaaaaaaaaaaaaaaaaaaaaaaaaaaaaaaaaaaaaaaaaaaaaaaaaaaaaaaaaaaaaaaaaaaaaaaaaaaaaaaaaaaaaaaaaaaaaaaaaaaaaaaaaaaaaaaaaaaaaaaaaaaaaaaaaaaaaaaaaaaaaaaaaaaaaaaaaaaaaaaaaaaaactgccatcagtcggcgtggactgtagaacactgccaatgccggtcccaagcccggataaaagtggagggtacagtccacgc

SEQ ID NO: 1392 - DNA, 1932 bp, synthetic construct
  source 1..1932: mol_type = other DNA
gccatcagtcgccggtcccaagcccggataaaatgggagggggcgggaaaccgcctaaccatgccgactgatggcagagcggccgcgtcgacgggcccgcggaattccaaaaaaaaaaaaccaaaaaaaaaaaacaaaaaaaaaaaataattgactaattaaaacagcggatgggtaccccaccatccgacccactgggtgtagtactctggtacttcgtacctttgtacgcctgttcttcccattgtacccttcctgaacttccaacccaagtaacgttagaagctcaacatttagtacaacaggaagcaccacatccagtggtgtttagtacaagcacttctgtttccccggagcgaggtataggctgtacccactgccaaaaacctttaaccgttatccgccaaccaactacgtaaaagctagtagtattatgtttttaactaggcgttcgatcaggtggatttcccctccactagtttggtcgatgaggctaggaattccccacgggtgaccgtgtcctagcctgcgtggcggccaacccagcccactcactatttgttttcgcgcccagttgcaaaaagtgtcggggctgggacgcctttttatagacatggtgtgaagactcgcatgtgcttggttgtgattcctccggcccctgaatgcggctaaccttaaccctggagccttgtgtcacaaaccagtgatgataaggtcgtaatgagcaattccgggacgggaccgactactttgggtgtccgtgtttcttatttttcttattattgtcttatggtcacagcatatatataacatatactgtgatcatggtgagcaagggcgaggagctgttcaccggggtggtgcccatcctggtcgagctggacggcgacgtaaacggccacaagttcagcgtgtccggcgagggcgagggcgatgccacctacggcaagctgaccctgaagttcatctgcaccaccggcaagctgcccgtgccctggcccaccctcgtgaccaccctgacctacggcgtgcagtgcttcagccgctaccccgaccacatgaagcagcacgacttcttcaagtccgccatgcccgaaggctacgtccaggagcgcaccatcttcttcaaggacgacggcaactacaagacccgcgccgaggtgaagttcgagggcgacaccctggtgaaccgcatcgagctgaagggcatcgacttcaaggaggacggcaacatcctggggcacaagctggagtacaactacaacagccacaacgtctatatcatggccgacaagcagaagaacggcatcaaggtgaacttcaagatccgccacaacatcgaggacggcagcgtgcagctcgccgaccactaccagcagaacacccccatcggcgacggccccgtgctgctgcccgacaaccactacctgagcacccagtccgccctgagcaaagaccccaacgagaagcgcgatcacatggtcctgctggagttcgtgaccgccgccgggatcactctcggcatggacgagctgtacaagtaactcgagctggtactgcatgcacgcaatgctagctgcccctttcccgtcctgggtaccccgagtctcccccgacctcgggtcccaggtatgctcccacctccacctgccccactcaccacctctgctagttccagacacctcccaagcacgcagcaatgcagctcaaaacgcttagcctagccacacccccacgggaaacagcagtgattaacctttagcaataaacgaaagtttaactaagctatactaaccccagggttggtcaatttcgtgccagccacaccctggagctagccgaagtaaaaaactgccatcagtcggcgtggactgtagaacactgccaatgccggtcccaagcccggataaaagtggagggtacagtccacgc

SEQ ID NO: 1393 - DNA, 1738 bp, synthetic construct
  source 1..1738: mol_type = other DNA
gccatcagtcgccggtcccaagcccggataaaatgggagggggcgggaaaccgcctaaccatgccgactgatggcagagcggccgcgtcgacgggcccgcggaattccaaaaaaaaaaaaccaaaaaaaaaaaacaaaaaaaaaaaataattgactaattaaaacagcggatgggtaccccaccatccgacccactgggtgtagtactctggtacttcgtacctttgtacgcctgttcttcccattgtacccttcctgaacttccaacccaagtaacgttagaagctcaacatttagtacaacaggaagcaccacatccagtggtgtttagtacaagcacttctgtttccccggagcgaggtataggctgtacccactgccaaaaacctttaaccgttatccgccaaccaactacgtaaaagctagtagtattatgtttttaactaggcgttcgatcaggtggatttcccctccactagtttggtcgatgaggctaggaattccccacgggtgaccgtgtcctagcctgcgtggcggccaacccagcccactcactatttgttttcgcgcccagttgcaaaaagtgtcggggctgggacgcctttttatagacatggtgtgaagactcgcatgtgcttggttgtgattcctccggcccctgaatgcggctaaccttaaccctggagccttgtgtcacaaaccagtgatgataaggtcgtaatgagcaattccgggacgggaccgactactttgggtgtccgtgtttcttatttttcttattattgtcttatggtcacagcatatatataacatatactgtgatcatggtgagcaagggcgaggagctgttcaccggggtggtgcccatcctggtcgagctggacggcgacgtaaacggccacaagttcagcgtgtccggcgagggcgagggcgatgccacctacggcaagctgaccctgaagttcatctgcaccaccggcaagctgcccgtgccctggcccaccctcgtgaccaccctgacctacggcgtgcagtgcttcagccgctaccccgaccacatgaagcagcacgacttcttcaagtccgccatgcccgaaggctacgtccaggagcgcaccatcttcttcaaggacgacggcaactacaagacccgcgccgaggtgaagttcgagggcgacaccctggtgaaccgcatcgagctgaagggcatcgacttcaaggaggacggcaacatcctggggcacaagctggagtacaactacaacagccacaacgtctatatcatggccgacaagcagaagaacggcatcaaggtgaacttcaagatccgccacaacatcgaggacggcagcgtgcagctcgccgaccactaccagcagaacacccccatcggcgacggccccgtgctgctgcccgacaaccactacctgagcacccagtccgccctgagcaaagaccccaacgagaagcgcgatcacatggtcctgctggagttcgtgaccgccgccgggatcactctcggcatggacgagctgtacaagtaagctggagcctcggtggccatgcttcttgccccttgggcctccccccagcccctcctccccttcctgcacccgtacccccgtggtctttgaataaagtctgacgaagtaaaaaactgccatcagtcggcgtggactgtagaacactgccaatgccggtcccaagcccggataaaagtggagggtacagtccacgc

SEQ ID NO: 1394 - DNA, 20 bp, synthetic construct
  source 1..20: mol_type = other DNA
gaagctgttggctgaaaagg

SEQ ID NO: 1395 - DNA, 20 bp, synthetic construct
  source 1..20: mol_type = other DNA
ctcactgacgttggcaaaga

SEQ ID NO: 1396 - DNA, 19 bp, synthetic construct
  source 1..19: mol_type = other DNA
cgcggccaacaagaagatg

SEQ ID NO: 1397 - DNA, 20 bp, synthetic construct
  source 1..20: mol_type = other DNA
cgacgagtaggatgagaccg

SEQ ID NO: 1398 - DNA, 23 bp, synthetic construct
  source 1..23: mol_type = other DNA
tatgcctgccgtgtgaaccatgt

SEQ ID NO: 1399 - DNA, 25 bp, synthetic construct
  source 1..25: mol_type = other DNA
ggcatcttcaaacctccatgatgct

SEQ ID NO: 1400 - DNA, 20 bp, synthetic construct
  source 1..20: mol_type = other DNA
acagtcagccgcatcttctt

SEQ ID NO: 1401 - DNA, 20 bp, synthetic construct
  source 1..20: mol_type = other DNA
acgaccaaatccgttgactc

SEQ ID NO: 1402 - DNA, 18 bp, synthetic construct
  source 1..18: mol_type = other DNA
atccacgcttcctgctgc

SEQ ID NO: 1403 - DNA, 18 bp, synthetic construct
  source 1..18: mol_type = other DNA
cacggtcacctgctcctg

SEQ ID NO: 1404 - DNA, 20 bp, synthetic construct
  source 1..20: mol_type = other DNA
acgtaaacggccacaagttc

SEQ ID NO: 1405 - DNA, 20 bp, synthetic construct
  source 1..20: mol_type = other DNA
aagtcgtgctgcttcatgtg

SEQ ID NO: 1406 - DNA, 20 bp, synthetic construct
  source 1..20: mol_type = other DNA
acaaccactacctgagcacc

SEQ ID NO: 1407 - DNA, 16 bp, synthetic construct
  source 1..16: mol_type = other DNA
aattccgcgggcccgt

SEQ ID NO: 1408 - DNA, 1370 bp, synthetic construct
  source 1..1370: mol_type = other DNA
taatacgactcactatagggccatcagtcgccggtcccaagcccggataaaatgggagggggcgggaaaccgcctaaccatgccgactgatggcagaagcaggtttccacaactgataaaactcgtgcaacttgaaactccgcctggtctttccaggtctagaggggttacactttgtactgtgctcgactccacgcccggtccactggcgggtgttagtagcagcactgttgtttcgtagcggagcatggtggccgtgggaactcctccttggtgacaagggcccacggggccgaaagccacgtccagacggacccaccatgtgtgcaaccccagcacggcaacttttactgcgaacaccaccttaaggtgacactggtactggtactcggtcactggtgacaggctaaggatgcccttcaggtaccccgaggtaacacgggacactcgggatctgagaaggggattgggacttctttaaaagtgcccagtttaaaaagcttctacgcctgaataggcgaccggaggccggcgcctttccattacccactactaaatcatggtgagcaagggcgaggagctgttcaccggggtggtgcccatcctggtcgagctggacggcgacgtaaacggccacaagttcagcgtgtccggcgagggcgagggcgatgccacctacggcaagctgaccctgaagttcatctgcaccaccggcaagctgcccgtgccctggcccaccctcgtgaccaccctgacctacggcgtgcagtgcttcagccgctaccccgaccacatgaagcagcacgacttcttcaagtccgccatgcccgaaggctacgtccaggagcgcaccatcttcttcaaggacgacggcaactacaagacccgcgccgaggtgaagttcgagggcgacaccctggtgaaccgcatcgagctgaagggcatcgacttcaaggaggacggcaacatcctggggcacaagctggagtacaactacaacagccacaacgtctatatcatggccgacaagcagaagaacggcatcaaggtgaacttcaagatccgccacaacatcgaggacggcagcgtgcagctcgccgaccactaccagcagaacacccccatcggcgacggccccgtgctgctgcccgacaaccactacctgagcacccagtccgccctgagcaaagaccccaacgagaagcgcgatcacatggtcctgctggagttcgtgaccgccgccgggatcactctcggcatggacgagctgtacaagtaaaaaactgccatcagtcggcgtggactgtagaacactgccaatgccggtcccaagcccggataaaagtggagggtacagtccacgctttttt

SEQ ID NO: 1409 - DNA, 1532 bp, synthetic construct
  source 1..1532: mol_type = other DNA
taatacgactcactatagggccatcagtcgccggtcccaagcccggataaaatgggagggggcgggaaaccgcctaaccatgccgactgatggcaggcggccgcgtcgacgggcccgcggaattccgccccccccccctctccctcccccccccctaacgttactggccgaagccgcttggaataaggccggtgtgcgtttgtctatatgttattttccaccatattgccgtcttttggcaatgtgagggcccggaaacctggccctgtcttcttgacgagcattcctaggggtctttcccctctcgccaaaggaatgcaaggtctgttgaatgtcgtgaaggaagcagttcctctggaagcttcttgaagacaaacaacgtctgtagcgaccctttgcaggcagcggaaccccccacctggcgacaggtgcctctgcggccaaaagccacgtgtataagatacacctgcaaaggcggcacaaccccagtgccacgttgtgagttggatagttgtggaaagagtcaaatggctctcctcaagcgtattcaacaaggggctgaaggatgcccagaaggtaccccattgtatgggatctgatctggggcctcggtgcacatgctttacatgtgtttagtcgaggttaaaaaaacgtctaggccccccgaaccacggggacgtggttttcctttgaaaaacacgatgataatatggccacaaccatggtgagcaagggcgaggagctgttcaccggggtggtgcccatcctggtcgagctggacggcgacgtaaacggccacaagttcagcgtgtccggcgagggcgagggcgatgccacctacggcaagctgaccctgaagttcatctgcaccaccggcaagctgcccgtgccctggcccaccctcgtgaccaccctgacctacggcgtgcagtgcttcagccgctaccccgaccacatgaagcagcacgacttcttcaagtccgccatgcccgaaggctacgtccaggagcgcaccatcttcttcaaggacgacggcaactacaagacccgcgccgaggtgaagttcgagggcgacaccctggtgaaccgcatcgagctgaagggcatcgacttcaaggaggacggcaacatcctggggcacaagctggagtacaactacaacagccacaacgtctatatcatggccgacaagcagaagaacggcatcaaggtgaacttcaagatccgccacaacatcgaggacggcagcgtgcagctcgccgaccactaccagcagaacacccccatcggcgacggccccgtgctgctgcccgacaaccactacctgagcacccagtccgccctgagcaaagaccccaacgagaagcgcgatcacatggtcctgctggagttcgtgaccgccgccgggatcactctcggcatggacgagctgtacaagtaaaaaactgccatcagtcggcgtggactgtagaacactgccaatgccggtcccaagcccggataaaagtggagggtacagtccacgctttttt

SEQ ID NO: 1410 - DNA, 2111 bp, synthetic construct
  source 1..2111: mol_type = other DNA
taatacgactcactatagggccatcagtcgccggtcccaagcccggataaaatgggagggggcgggaaaccgcctaaccatgccgactgatggcaggcggccgcgtcgacgggcccgcggaattccgccccccccccctctccctcccccccccctaacgttactggccgaagccgcttggaataaggccggtgtgcgtttgtctatatgttattttccaccatattgccgtcttttggcaatgtgagggcccggaaacctggccctgtcttcttgacgagcattcctaggggtctttcccctctcgccaaaggaatgcaaggtctgttgaatgtcgtgaaggaagcagttcctctggaagcttcttgaagacaaacaacgtctgtagcgaccctttgcaggcagcggaaccccccacctggcgacaggtgcctctgcggccaaaagccacgtgtataagatacacctgcaaaggcggcacaaccccagtgccacgttgtgagttggatagttgtggaaagagtcaaatggctctcctcaagcgtattcaacaaggggctgaaggatgcccagaaggtaccccattgtatgggatctgatctggggcctcggtgcacatgctttacatgtgtttagtcgaggttaaaaaaacgtctaggccccccgaaccacggggacgtggttttcctttgaaaaacacgatgataatatggccacaaccatggtgagcaagggcgaggagctgttcaccggggtggtgcccatcctggtcgagctggacggcgacgtaaacggccacaagttcagcgtgtccggcgagggcgagggcgatgccacctacggcaagctgaccctgaagttcatctgcaccaccggcaagctgcccgtgccctggcccaccctcgtgaccaccctgacctacggcgtgcagtgcttcagccgctaccccgaccacatgaagcagcacgacttcttcaagtccgccatgcccgaaggctacgtccaggagcgcaccatcttcttcaaggacgacggcaactacaagacccgcgccgaggtgaagttcgagggcgacaccctggtgaaccgcatcgagctgaagggcatcgacttcaaggaggacggcaacatcctggggcacaagctggagtacaactacaacagccacaacgtctatatcatggccgacaagcagaagaacggcatcaaggtgaacttcaagatccgccacaacatcgaggacggcagcgtgcagctcgccgaccactaccagcagaacacccccatcggcgacggccccgtgctgctgcccgacaaccactacctgagcacccagtccgccctgagcaaagaccccaacgagaagcgcgatcacatggtcctgctggagttcgtgaccgccgccgggatcactctcggcatggacgagctgtacaagtaaggatccaatcaacctctggattacaaaatttgtgaaagattgactggtattcttaactatgttgctccttttacgctatgtggatacgctgctttaatgcctttgtatcatgctattgcttcccgtatggctttcattttctcctccttgtataaatcctggttgctgtctctttatgaggagttgtggcccgttgtcaggcaacgtggcgtggtgtgcactgtgtttgctgacgcaacccccactggttggggcattgccaccacctgtcagctcctttccgggactttcgctttccccctccctattgccacggcggaactcatcgccgcctgccttgcccgctgctggacaggggctcggctgttgggcactgacaattccgtggtgttgtcggggaaatcatcgtcctttccttggctgctcgcctgtgttgccacctggattctgcgcgggacgtccttctgctacgtcccttcggccctcaatccagcggaccttccttcccgcggcctgctgccggctctgcggcctcttccgcgtcttcgaagtaaaaaaaaaaaaaaaaaaaaaaaaaaaaaaactgccatcagtcggcgtggactgtagaacactgccaatgccggtcccaagcccggataaaagtggagggtacagtccacgctttttt

SEQ ID NO: 1411 - DNA, 19 bp, synthetic construct
  source 1..19: mol_type = other DNA
taatacgactcactatagg

SEQ ID NO: 1412 - RNA, 56 nt, synthetic construct
  source 1..56: mol_type = other RNA
gccatcagtcgccggtcccaagcccggataaaatgggagggggcgggaaaccgcct

SEQ ID NO: 1413 - RNA, 21 nt, synthetic construct
  source 1..21: mol_type = other RNA
aaccatgccgactgatggcag

SEQ ID NO: 1414 - RNA, 26 nt, synthetic construct
  source 1..26: mol_type = other RNA
ctgccatcagtcggcgtggactgtag

SEQ ID NO: 1415 - RNA, 55 nt, synthetic construct
  source 1..55: mol_type = other RNA
aacactgccaatgccggtcccaagcccggataaaagtggagggtacagtccacgc

SEQ ID NO: 1416 - DNA, 845 bp, synthetic construct
  source 1..845: mol_type = other DNA
gggtctctctggttagaccagatctgagcctgggagctctctggctaactagggaacccactgcttaagcctcaataaagcttgccttgagtgcttcaagtagtgtgtgcccgtctgttgtgtgactctggtaactagagatccctcagacccttttagtcagtgtggaaaatctctagcagtggcgcccgaacagggacttgaaagcgaaagggaaaccagaggagctctctcgacgcaggactcggcttgctgaagcgcgcacggcaagaggcgaggggcggcgactggtgagtacgccaaaaattttgactagcggaggctagaaggagagagatgggtgcgagagcgtcagtattaagcgggggagaattagatcgcgatgggaaaaaattcggttaaggccagggggaaagaaaaaatataaattaaaacatatagtatgggcaagcagggagctagaacgattcgcagttaatcctggcctgttagaaacatcagaaggctgtagacaaatactgggacagctacaaccatcccttcagacaggatcagaagaacttagatcattatataatacagtagcaaccctctattgtgtgcatcaaaggatagagataaaagacaccaaggaagctttagacaagatagaggaagagcaaaacaaaagtaagaccaccgcacagcaagcggccgctgatcttcagacctggaggaggagatatgagggacaattggagaagtgaattatataaatataaagtagtaaaaattgaaccattaggagtagcacccaccaaggcaaagagaagagtggtgcagagagaaaaaagagcagtgggaat

SEQ ID NO: 1417 - RNA, 10 nt, synthetic construct
  source 1..10: mol_type = other RNA
tggactgtag

SEQ ID NO: 1418 - RNA, 15 nt, synthetic construct
  source 1..15: mol_type = other RNA
tggactgtagaacca

SEQ ID NO: 1419 - protein, 9 aa, synthetic construct
GLFGNLIAL

SEQ ID NO: 1420 - protein, 9 aa, synthetic construct
GCFGNLIAL

SEQ ID NO: 1421 - protein, 9 aa, synthetic construct
SLLYEYFTV

SEQ ID NO: 1422 - protein, 9 aa, synthetic construct
SLTYEYFTV

SEQ ID NO: 1423 - protein, 9 aa, synthetic construct
SLGYEYFTV

SEQ ID NO: 1424 - protein, 9 aa, synthetic construct
KVLPKHSLL

SEQ ID NO: 1425 - protein, 9 aa, synthetic construct
KVLPKHSLT

SEQ ID NO: 1426 - protein, 9 aa, synthetic construct
KVLPKHSLG

SEQ ID NO: 1427 - protein, 9 aa, synthetic construct
ILEDIVLTL

SEQ ID NO: 1428 - protein, 9 aa, synthetic construct
IGEDIVLTL

SEQ ID NO: 1429 - protein, 9 aa, synthetic construct
ILEDIVLTQ

SEQ ID NO: 1430 - protein, 9 aa, synthetic construct
SLHEHIANL

SEQ ID NO: 1431 - protein, 9 aa, synthetic construct
SLHEHIANP

SEQ ID NO: 1432 - protein, 9 aa, synthetic construct
SLHEHIANG

SEQ ID NO: 1433 - protein, 9 aa, synthetic construct
YLASHYEKL

SEQ ID NO: 1434 - protein, 9 aa, synthetic construct
YLASHYEKG

SEQ ID NO: 1435 - protein, 9 aa, synthetic construct
YLDEIIEQI

SEQ ID NO: 1436 - protein, 9 aa, synthetic construct
YLDEIIEQQ

SEQ ID NO: 1437 - protein, 9 aa, synthetic construct
QISEFSKRV

SEQ ID NO: 1438 - protein, 9 aa, synthetic construct
QQSEFSKRV

SEQ ID NO: 1439 - protein, 1367 aa, Streptococcus pyogenes
DKKYSIGLDIGTNSVGWAVITDEYKVPSKKFKVLGNTDRHSIKKNLIGALLFDSGETAEATRLKRTARRRYTRRKNRICYLQEIFSNEMAKVDDSFFHRLEESFLVEEDKKHERHPIFGNIVDEVAYHEKYPTIYHLRKKLVDSTDKADLRLIYLALAHMIKFRGHFLIEGDLNPDNSDVDKLFIQLVQTYNQLFEENPINASGVDAKAILSARLSKSRRLENLIAQLPGEKKNGLFGNLIALSLGLTPNFKSNFDLAEDAKLQLSKDTYDDDLDNLLAQIGDQYADLFLAAKNLSDAILLSDILRVNTEITKAPLSASMIKRYDEHHQDLTLLKALVRQQLPEKYKEIFFDQSKNGYAGYIDGGASQEEFYKFIKPILEKMDGTEELLVKLNREDLLRKQRTFDNGSIPHQIHLGELHAILRRQEDFYPFLKDNREKIEKILTFRIPYYVGPLARGNSRFAWMTRKSEETITPWNFEEVVDKGASAQSFIERMTNFDKNLPNEKVLPKHSLLYEYFTVYNELTKVKYVTEGMRKPAFLSGEQKKAIVDLLFKTNRKVTVKQLKEDYFKKIECFDSVEISGVEDRFNASLGTYHDLLKIIKDKDFLDNEENEDILEDIVLTLTLFEDREMIEERLKTYAHLFDDKVMKQLKRRRYTGWGRLSRKLINGIRDKQSGKTILDFLKSDGFANRNFMQLIHDDSLTFKEDIQKAQVSGQGDSLHEHIANLAGSPAIKKGILQTVKVVDELVKVMGRHKPENIVIEMARENQTTQKGQKNSRERMKRIEEGIKELGSQILKEHPVENTQLQNEKLYLYYLQNGRDMYVDQELDINRLSDYDVDHIVPQSFLKDDSIDNKVLTRSDKNRGKSDNVPSEEVVKKMKNYWRQLLNAKLITQRKFDNLTKAERGGLSELDKAGFIKRQLVETRQITKHVAQILDSRMNTKYDENDKLIREVKVITLKSKLVSDFRKDFQFYKVREINNYHHAHDAYLNAVVGTALIKKYPKLESEFVYGDYKVYDVRKMIAKSEQEIGKATAKYFFYSNIMNFFKTEITLANGEIRKRPLIETNGETGEIVWDKGRDFATVRKVLSMPQVNIVKKTEVQTGGFSKESILPKRNSDKLIARKKDWDPKKYGGFDSPTVAYSVLVVAKVEKGKSKKLKSVKELLGITIMERSSFEKNPIDFLEAKGYKEVKKDLIIKLPKYSLFELENGRKRMLASAGELQKGNELALPSKYVNFLYLASHYEKLKGSPEDNEQKQLFVEQHKHYLDEIIEQISEFSKRVILADANLDKVLSAYNKHRDKPIREQAENIIHLFTLTNLGAPAAFKYFDTTIDRKRYTSTKEVLDATLIHQSITGLYETRIDLSQLGGD
